(19) United States
(12) Patent Application Publication
(10) Pub. No.: US 2024/0294585 A1
(43) Pub. Date: Sep. 5, 2024

(54) MODULAR BINDING PROTEINS FOR EXTRACELLULAR VESICLES AND USES THEREOF

(71) Applicants: Colin David Gottlieb, San Francisco, CA (US); Mantra Bio, Inc., San Francisco, CA (US)

(72) Inventor: Colin David Gottlieb, San Francisco, CA (US)

(21) Appl. No.: 17/996,066

(22) PCT Filed: Apr. 13, 2021
(86) PCT No.: PCT/US2021/027157

§ 371 Date: Oct. 12, 2022

Related U.S. Application Data
(60) Provisional application No. 63/009,392, filed on Apr. 13, 2020.

(51) Int. Cl. C07K 14/47; A61K 38/00; C07K 14/705

(52) U.S. Cl. CPC C07K 14/47; C07K 14/705; A61K 38/00; C07K 2319/03

(57) ABSTRACT

Disclosed herein are EVs and/or exosomes engineered with targeting moieties. These targeting moieties can be used to target payloads to target cells in a subject. These payloads can be carried in EVs, exosomes, liposomes or other delivery vehicles. The engineered EVs and/or exosomes can also display molecules capable of disrupting EV and/or exosome communication between cells in disease states.

[0001] This subject patent application claims the benefit under 35 U.S.C. § 119(e) to U.S. Provisional Application No. 63/009,392, filed Apr. 13, 2020, the contents of which are herein incorporated by reference in their entireties into the present patent application for all purposes.

[0002] Throughout this application various publications are referenced. All publications, gene transcript identifiers, patents, and patent applications mentioned in this specification are herein incorporated by reference to the same extent as if each individual publication, gene transcript identifiers, patent, or patent application was specifically and individually indicated to be incorporated by reference.

### BACKGROUND OF THE INVENTION

[0003] Intercellular communication is needed for cell development and the maintenance of homeostasis in multicellular organisms. These communications between cells can be localized or distant. Distant intercellular communication is facilitated by molecules like hormones that send signals through circulatory system to other parts of the body. Another case of distant intercellular communication also occurs through extracellular vesicles (EVs), which are membrane-based structures. EVs serve as vehicles to carry different types of cellular cargo—such as lipids, proteins, receptors and effector molecules—to the recipient cells.

[0004] EVs include microvesicles or ectosomes, apoptotic bodies, and exosomes. Microvesicles or ectosomes are vesicles assembled at and released from the plasma membrane. They may be formed through the outward budding and fission from plasma membranes. Exosomes originate from the endosome compartment in cells and have a smaller size, ranging from 30 to 200 nm. Exosomes arise as small vesicles within larger membrane structures in the endosome within a cell. The endosome, also called the multivesicular body, can be exocytized, with ensuing release to the extracellular space of their vesicles as exosomes. It has been demonstrated that almost all living cells can secrete exosomes, and exosomes widely exist in various body fluids. EVs carry protein, mRNA, miRNA, tRNA, yRNA, DNA, lipids and other ingredients derived from the secreting cells, and protect them from degradation by the external environment, and are beneficial to their biological function of active ingredients. EVs can be internalized by receptor cells through giant pinocytosis or macropinocytosis, fusion, phagocytosis, raft-mediated endocytosis, lipid rafts, receptor-mediated endocytosis, adhesion, antigen recognition, juxtacrine signaling, and soluble signaling. The internalized EVs can regulate and control multiple biological function of receptor cells and play an important role in intercellular communication.

[0005] Both exosomes and microvesicles are known to facilitate intercellular communication processes between cells in close proximity as well as distant cells. Tumor cells have also been shown to exploit EVs to contribute to their progression by inactivating T lymphocytes or natural killer cells as well as promoting differentiation of regulatory T lymphocytes to suppress immune reactions. Moreover, several pathogenic proteins such as prions and β-amyloid peptides have also been reported to exploit exosomes in order to propagate to other cells.

[0006] There remains a need for producing EVs having a desired targeting moiety(ies) (such as a peptide or protein that targets a cell, tissue, organ or a specific cell type) on its surface and to be able to change the desired targeting moiety(ies) on the EV quickly and efficiently without affecting the luminal content or membrane composition of the EV. Currently, indication-specific complex biological therapeutic EVs must be generated through engineering individual producer cell lines and characterizing the resulting EVs. Changing the desired targeting moiety(ies) for the EV requires a different producer cell line for every change. This is a time consuming and slow process. In addition, each new producer cell line may produce EVs having different luminal content and/or membrane composition, introducing uncertainty as to the therapeutic suitability or quality of the EV bearing the desired targeting moiety(ies). The discovery herein addresses the problem of producing EVs with different targeting agents while maintaining, e.g., the same luminal content and membrane composition.

### SUMMARY OF THE INVENTION

[0007] The invention provides EVs and/or exosomes that are engineered to display desired targeting moiety(ies) and production methods thereof. The desired targeting moiety(ies) can be a polypeptide (such as, a targeting protein or affinity peptide), lipid, carbohydrate, nucleic acid, nucleic acid analog (such as, antisense oligonucleotide (ASO, 2′-O-methyl (OMe), 2′-fluoro (F), and 2′-O-methoxyethyl (MOE) RNA, locked nucleic acid (LNA), constrained ethyl (cEt), phosphorodiamidate morpholinos (PMOs), phosphorothioate, and peptide nucleic acid (PNA)), ligand, aptamer, small molecules, chemical compound or macromolecules. Polypeptides can include, for example, polypeptides that target an EV and/or exosome to a desired location. EVs and/or exosomes may be modified with certain desired molecules. Such molecules may be displayed on the surface of the EVs and/or exosomes. Desired molecules on the EVs and/or exosomes can be used to enrich EVs and/or exosomes, traffic the EV and/or exosomes in the body to a desired site, recognize/bind to target cells, induce a therapeutic effect, and/or fuse the EVs and/or exosomes to a target cell.

[0008] Novel and innovative production methods are described. This involves the use of isopeptide domains and isopeptide tags adapted from proteins that spontaneously form isopeptide bonds. The isopeptide domain and complementary isopeptide tag can each be separately fused to proteins of interest so that the two proteins can be joined together through the formation of an isopeptide bond. Isopeptide domains and complementary isopeptide tags can be used to engineer EVs and/or exosomes to display polypeptides of interest. The displayed polypeptides can impart to the EV and/or exosome a desired property, function, and/or characteristic. For example, an isopeptide domain can be displayed by a vesicle localization moiety on an EV or exosome. A targeting moiety (e.g., a targeting polypeptide, affinity peptide, anti-sense oligonucleotide, ligand, aptamer, etc.) can be fused by an isopeptide bond to the vesicle localization moiety through the isopeptide domain by making a desired molecule with an isopeptide tag. The isopeptide domain and the isopeptide tag can associate with one another and form an isopeptide bond linking the two and the vesicle localization moiety and desired molecule (the latter also referred to herein as targeting agent or targeting moiety) together.

[0009] Examples of proteins that can be engineered to an EV and/or exosome include, for example, proteins that can traffic and/or target an EV and/or exosome to a desired location in a subject. For example, peptides or scFvs can be engineered onto an EV and/or exosome that specifically bind to a protein target on a cell.

[0010] Engineered EVs or exosomes can carry a payload that can be any molecule that can cause a change (e.g., phenotypic or genotypic) in the target cell. Payloads can include, for example, polypeptides (e.g., biologics or membrane associate proteins), small molecules (e.g., drugs), RNA (e.g., siRNA, miRNA, antisense RNA, lncRNA), DNA (e.g., transgenes, expression vectors, DNA constructs), nucleic acid analog (such as, antisense oligonucleotide (ASO, 2′-O-methyl (OMe), 2′-fluoro (F), and 2′-O-methoxyethyl (MOE) RNA, locked nucleic acid (LNA), constrained ethyl (cEt), phosphorodiamidate morpholinos (PMOs), phosphorothioate, and peptide nucleic acid (PNA)), viral vectors (e.g., retroviruses, lentiviruses, adenoviruses, adeno-associated viruses, recombinant viruses and hybrid viruses), oncolytic viruses (e.g., modified herpesvirus (such as, herpes simplex virus-1 (e.g., T-VEC; Imlygic®)), modified adenovirus, modified vaccinia virus, modified reovirus, modified measles virus, modified polio/rhinovirus, modified vesicular stomatitis virus, modified coxsackievirus and modified retrovirus), genome editing systems (e.g., CRISPR/cas9), or a reporter (e.g., GFP or luciferase) or a combination thereof. In some embodiments, engineered EVs and/or exosomes can be used to systemically, intravitreally, or intranasally administer drugs targeting cells in a desired location as these EVs and/or exosomes can traffic to and interact with target cells at the desired location.

[0011] Engineered EVs of the invention (e.g., exosomes) may target cells or tissues in a subject and deliver appropriate therapeutic or diagnostic payloads at the target site. The engineered EVs and/or exosomes of the invention can traffic to the desired location in a subject and deliver the therapeutic or diagnostic payload to the target site.

[0012] Alternatively, naturally occurring exosomes in diseased subjects have been linked to disease and disease progression. In these situations, engineered EVs of the invention can be used to display markers that are complementary to the diseased EVs and/or exosomes, or the engineered EVs of the invention can display markers complementary to the markers on the target cells that interact with the diseased EVs and/or exosomes. In this way, the interaction and progression of disease through EV and/or exosome trafficking can be inhibited and/or blocked by competition for complementary marker binding. Alternatively, antibodies that bind to a marker (or binding pair protein) and/or EV or exosome markers can be used to inhibit and/or block the interaction between diseased EVs and/or exosomes and target cells.

### BRIEF DESCRIPTION OF THE FIGURES

[0013] FIG. 1 is a schematic of a construct map showing the arrangement in an isopeptide domain-vesicle localization moiety (VLM) fusion protein comprising a signal sequence (SS), epitope sequence, Isopeptide(1) domain (Isopeptide-1) and IGSF8 vesicle localization moiety and an expression plasmid for production of the fusion protein. The fusion protein additionally comprises a peptide linker which joins Isopeptide-1 and IGSF. Note as in all fusion proteins with signal sequence expressed in cell culture (such mammalian cells or human cells), the mature fusion protein lacks the signal sequence of the nascent protein, and consequently, an exosome obtained from such a cell culture or cells comprising the fusion protein displays the N-terminally localized isopeptide domain (such as in this case, Isopeptide-1) or isopeptide tag in relation to the vesicle localization moiety (such as IGSF8 in the current case) external to the exosome. Nucleic acid coding sequence and amino acid sequence of the fusion protein are provided in SEQ ID NO: 197 and 198, respectively.

[0014] FIG. 2 is a schematic of a construct map showing the arrangement in an isopeptide domain-VLM fusion protein comprising a signal sequence (SS), epitope sequence, Isopeptide(2) domain (Isopeptide-2) and IGSF8 vesicle localization moiety and an expression plasmid for production of the fusion protein. The fusion protein additionally comprises a peptide linker which joins Isopeptide-2 and IGSF. Nucleic acid coding sequence and amino acid sequence of the fusion protein are provided in SEQ ID NO: 199 and 200, respectively.

[0015] FIG. 3 is a schematic of a construct map showing the arrangement in an isopeptide domain-VLM fusion protein comprising a signal sequence (SS), epitope sequence, Isopeptide(1) domain (Isopeptide-1), isopeptide(2) domain (Isopeptide-2) and IGSF8 vesicle localization moiety and an expression plasmid for production of the fusion protein. The fusion protein additionally comprises two peptide linkers, one joining Isopeptide-2 and IGSF and another joining Isopeptide-1 and Isopeptide-2. Nucleic acid coding sequence and amino acid sequence of the fusion protein are provided in SEQ ID NO: 201 and 202, respectively.

[0016] FIG. 4 is a schematic of a construct map showing the arrangement in an isopeptide domain-VLM fusion protein comprising a signal sequence (SS), epitope sequence, Isopeptide(3) domain (Isopeptide-3), Isopeptide(1) domain (Isopeptide-1), isopeptide(2) domain (Isopeptide-2) and IGSF8 vesicle localization moiety and an expression plasmid for production of the fusion protein. The fusion protein additionally comprises three peptide linkers, one joining Isopeptide-2 and IGSF, another joining Isopeptide-1 and Isopeptide-2, and a third joining Isopeptide-3 and Isopeptide-1. Nucleic acid coding sequence and amino acid sequence of the fusion protein are provided in SEQ ID NO: 203 and 204, respectively.

[0017] FIG. 5 is a bar graph showing construct expression levels of isopeptide(1)-IGSF8, isopeptide(2)-IGSF8, isopeptide(1) and (2)-IGSF8 (DiCatcher-IGSF8), isopeptide(3), (1), and (2)-IGSF8 (TriCatcher-IGSF8), and mock transfected (control) on an EV surface. The EVs are stained with a fluorophore-conjugated antibody that recognizes the epitope sequence (Flag) present in the isopeptide domain-IGSF8 fusion proteins. The bar graph indicates the % of EVs that are detectably stained with the antibody (Left vertical axis) and the median intensity of the antibody signal for an exosome positive for the antibody (right vertical axis).

[0018] FIG. 6 is a schematic of a construct map showing the arrangement in an isopeptide tag-VLM fusion protein comprising IGSF8 joined to an epitope sequence and isopeptide-1 tag via two linkers. Nucleic acid coding sequence and amino acid sequence of the fusion protein are provided in SEQ ID NO: 215 and 216, respectively.

[0019] FIG. 7 is a schematic of a construct map showing the arrangement in an isopeptide tag-VLM fusion protein comprising IGSF8 joined to an epitope sequence and isopeptide-2 tag via two linkers. Nucleic acid coding sequence and amino acid sequence of the fusion protein are provided in SEQ ID NO: 217 and 218, respectively.

[0020] FIG. 8 is a schematic of a construct map showing the arrangement in an isopeptide tag-VLM fusion protein comprising IGSF8 joined to an epitope sequence, isopeptide-1 tag and isopeptide-2 tag via two linkers. Nucleic acid coding sequence and amino acid sequence of the fusion protein are provided in SEQ ID NO: 219 and 220, respectively.

[0021] FIG. 9 is a schematic of a construct map showing the arrangement in an isopeptide tag-VLM fusion protein comprising IGSF8 joined to an epitope sequence, isopeptide-1 tag, isopeptide-2 tag and isopeptide-3 tag via three or more linkers. Nucleic acid coding sequence and amino acid sequence of the fusion protein are provided in SEQ ID NO: 221 and 222, respectively.

[0022] FIG. 10 is a consensus sequence table showing the sequence alignment of SEQ ID NOS: 2, 4, 6, 8, 10, 12, 14, 16, 18, 20, 22, 24, 26, 28, 30, 32, 34, 36, 38, 40, 42, 44, 46, 48, 50, 52, 54, 56, 58, and 60.

[0023] FIG. 11 is Cy3 fluorescence at about 98 kDa range in a SDS-PAGE gel dependent on EVs modified with Tricatcher-1-IGSF8 (of FIG. 4; SEQ ID NO: 204) and Cy3-labeled Isopeptide(1) tag-antisense oligonucleotide (ASO) conjugate demonstrating formation of a covalent bond between isopeptide domain present on Tricatcher-1-IGSF8 EV surface and isopeptide tag of the Isopeptide(1) tag-ASO conjugate consistent with formation of an isopeptide bond.

[0024] FIG. 12 is a combined capillary electrophoresis-Western blot analysis (Jess™ Simple Western system) of modified EVs comprising Isopeptide(2) domain-IGSF8 VLM (of FIG. 2; SEQ ID NO: 200; “Iso-2”), Isopeptide(1)_Isopeptide(2) domains-IGSF VLM (of FIG. 3; SEQ ID NO: 202; “Di”) or Tricatcher-1-IGSF8 VLM (of FIG. 4; SEQ ID NO: 204; “Tri”) fusion protein and unmodified EV control (“Un”) incubated with myc-epitope tagged Isopeptide(2) tag (Isopeptide-2 tag; SEQ ID NO: 240 or 242) fusion peptide and detected with anti-myc primary antibody for Isopeptide-2 tag fusion peptide or anti-Flag epitope tag primary antibody for IGSF8 fusion protein. Note that the presence of Isopeptide(2) domain in “Iso-2,” “Di” and “Tri” IGSF VLM fusion protein results in covalent attachment of Isopeptide(2) tag fusion peptide, consistent with the formation of an isopeptide bond. No covalent attachment of the Isopeptide(2) tag fusion peptide to a high molecular weight protein around the location of the IGSF8 VLM fusion protein is seen for the unmodified EV control samples which are not modified with IGSF8 VLM fusion protein.

[0025] FIG. 13 is a combined capillary electrophoresis-Western blot analysis (Jess™ Simple Western system) of modified EVs comprising “Iso-2”, “Di” or “Tri” VLM fusion protein as in FIG. 12 (above) and unmodified EV control (“Un”) incubated with S-tag labeled Isopeptide(1) tag fusion peptide (SEQ ID NO: 236 or 238), V5-epitope tagged Isopeptide(3) tag fusion peptide (SEQ ID NO: 244 or 246) or no fusion peptide control, followed by detection with anti-S-tag primary antibody, anti-V5-epitope tag primary antibody or anti-Flag epitope tag primary antibody, the latter to reveal the location of the Flag-epitope tagged VLM fusion protein. Covalent attachment due to isopeptide bond formation between isopeptide domain and isopeptide tag results in detection of the isopeptide tag fusion peptide in the high molecular weight range where the IGSF8 VLM fusion protein migrates.

[0026] FIG. 14 is a schematic of a construct map showing the arrangement in an isopeptide domain-VLM fusion protein comprising a signal sequence, epitope sequence, Isopeptide(1) domain, Isopeptide(3) domain and IGSF8 vesicle localization moiety, produced by expression vector 288. The fusion protein additionally comprises a peptide linker which joins Isopeptide-3 and IGSF and a peptide linker which joins Isopeptide-1 and Isopeptide-3. Nucleic acid coding sequence and amino acid sequence of the fusion protein are provided in SEQ ID NO: 205 and 206, respectively.

[0027] FIG. 15 is a schematic of a construct map showing the arrangement in an isopeptide domain-VLM fusion protein comprising a signal sequence, epitope sequence, Isopeptide(3) domain, Isopeptide(1) domain and IGSF8 vesicle localization moiety, produced by expression vector 289. The fusion protein additionally comprises a peptide linker which joins Isopeptide-1 and IGSF and a peptide linker which joins Isopeptide-3 and Isopeptide-1. Nucleic acid coding sequence and amino acid sequence of the fusion protein are provided in SEQ ID NO: 207 and 208, respectively.

[0028] FIG. 16 is a schematic of a construct map showing the arrangement in an isopeptide domain-chimeric VLM fusion protein comprising a signal sequence (mouse Ig Kappa Signal Peptide), epitope sequence, Isopeptide(3) domain, Isopeptide(1) domain and a chimeric VLM comprising Lamp2 surface and transmembrane domains and IL3RA cytosolic domain (Lamp2-IL3RA chimeric VLM) in place of a Lamp2 cytosolic domain, produced by expression vector 290. The fusion protein additionally comprises a peptide linker which joins Isopeptide-1 and Lamp2-IL3RA chimeric VLM and a peptide linker which joins Isopeptide-3 and Isopeptide-1. Nucleic acid coding sequence and amino acid sequence of the fusion protein are provided in SEQ ID NO: 209 and 210, respectively.

[0029] FIG. 17 is a schematic of a construct map showing the arrangement in an isopeptide domain-chimeric VLM fusion protein comprising a signal sequence (mouse Ig Kappa Signal Peptide), epitope sequence, Isopeptide(3) domain, Isopeptide(1) domain and a chimeric VLM comprising Lamp2 surface and transmembrane domains and SELPL cytosolic domain (Lamp2-SELPL chimeric VLM) in place of a Lamp2 cytosolic domain, produced by expression vector 291. The fusion protein additionally comprises a peptide linker which joins Isopeptide-1 and Lamp2-SELPL chimeric VLM and a peptide linker which joins Isopeptide-3 and Isopeptide-1. Nucleic acid coding sequence and amino acid sequence of the fusion protein are provided in SEQ ID NO: 211 and 212, respectively.

[0030] FIG. 18 is a schematic of a construct map showing the arrangement in an isopeptide domain-chimeric VLM fusion protein comprising a signal sequence, epitope sequence, Isopeptide(3) domain, Isopeptide(1) domain and a chimeric VLM comprising Lamp2 surface and transmembrane domains and PTGFRN cytosolic domain (Lamp2-PTGFRN chimeric VLM) in place of a Lamp2 cytosolic domain, produced by expression vector 293. The fusion protein additionally comprises a peptide linker which joins Isopeptide-1 and Lamp2-PTGFRN chimeric VLM and a peptide linker which joins Isopeptide-3 and Isopeptide-1. Nucleic acid coding sequence and amino acid sequence of the fusion protein are provided in SEQ ID NO: 213 and 214, respectively.

[0031] FIG. 19 is a schematic of a construct map showing the arrangement in a targeting moiety fusion protein comprising a signal sequence, epitope sequence, 6A6 scFv, a second epitope tag and Isopeptide(1) tag (Isopeptide tag-1), produced by expression vector 251. The fusion protein additionally comprises one or more peptide linkers which join Isopeptide tag-1 at the C-terminus and 6A6 scFv. Nucleic acid coding sequence and amino acid sequence of the fusion protein are provided in SEQ ID NO: 223 and 224, respectively.

[0032] FIG. 20 is a schematic of a construct map showing the arrangement in a targeting moiety fusion protein comprising a signal sequence, Isopeptide tag-1, epitope sequence, 6A6 scFv and a second epitope tag, produced by expression vector 252. The fusion protein additionally comprises one or more peptide linkers which join Isopeptide tag-1 between the signal sequence and 1^{st} epitope tag to 6A6 scFv and one or more peptide linkers which join C-terminal 2^{nd} epitope tag to carboxyl end of the scFv. Nucleic acid coding sequence and amino acid sequence of the fusion protein are provided in SEQ ID NO: 227 and 228, respectively.

[0033] FIG. 21 is a schematic of a construct map showing the arrangement in a targeting moiety fusion protein comprising a signal sequence, epitope sequence, alaC scFv, a second epitope tag and Isopeptide tag-1, produced by expression vector 269. The fusion protein additionally comprises one or more peptide linkers which join C-terminal Isopeptide tag-1 to a 2^{nd} epitope tag, one or more peptide linkers which join the 2^{nd} epitope tag to carboxyl end of alaC scFv. Nucleic acid coding sequence and amino acid sequence of the fusion protein are provided in SEQ ID NO: 225 and 226, respectively

### DETAILED DESCRIPTION OF THE INVENTION

[0034] Unless defined otherwise, all technical and scientific terms used herein have the same meaning as commonly understood by one of ordinary skill in the art to which this disclosure belongs. Although any methods and materials similar or equivalent to those described herein can also be used in the practice or testing of the present teachings, some exemplary methods and materials are now described. References to exemplary nucleic acid and amino acid sequences and, when applicable their respective SEQ ID Nos, are provided in the Tables herein

[0035] It must be noted that as used herein and in the appended claims, the singular forms “a”, “an”, and “the” include plural referents unless the context clearly dictates otherwise. It is further noted that the claims can be drafted to exclude any optional element. As such, this statement is intended to serve as antecedent basis for use of such exclusive terminology as “solely,” “only” and the like in connection with the recitation of claim elements, or use of a “negative” limitation. Numerical limitations given with respect to concentrations or levels of a substance are intended to be approximate, unless the context clearly dictates otherwise. Thus, where a concentration is indicated to be (for example) 10 μM, it is intended that the concentration be understood to be at least approximately or about 10 μM.

[0036] As will be apparent to those of skill in the art upon reading this disclosure, each of the individual embodiments described and illustrated herein has discrete components and features which can be readily separated from or combined with the features of any of the other several embodiments without departing from the scope or spirit of the present teachings. Any recited method can be carried out in the order of events recited or in any other order which is logically possible.

### Definitions

[0037] As used herein, an “antibody” is defined to be a protein or polypeptides functionally defined as a binding protein and structurally defined as comprising an amino acid sequence that is recognized by one of skill as being derived from the variable region of an immunoglobulin. An antibody can consist of one or more polypeptides substantially encoded by immunoglobulin genes, fragments of immunoglobulin genes, hybrid immunoglobulin genes (made by combining the genetic information from different animals), or synthetic immunoglobulin genes. The recognized, native, immunoglobulin genes include the kappa, lambda, alpha, gamma, delta, epsilon and mu constant region genes, as well as myriad immunoglobulin variable region genes and multiple D-segments and J-segments. Light chains are classified as either kappa or lambda. Heavy chains are classified as gamma, mu, alpha, delta, or epsilon, which in turn define the immunoglobulin classes, IgG, IgM, IgA, IgD and IgE, respectively. Antibodies exist as intact immunoglobulins, as a number of well characterized fragments produced by digestion with various peptidases, or as a variety of fragments made by recombinant DNA technology. Antibodies can derive from many different species (e.g., rabbit, sheep, camel, human, or rodent, such as mouse or rat), or can be synthetic. Antibodies can be chimeric, humanized, or humaneered. Antibodies can be monoclonal or polyclonal, multiple or single chained, fragments or intact immunoglobulins.

[0038] As used herein, an “antibody fragment” is defined to be at least one portion of an intact antibody, or recombinant variants thereof, and refers to the antigen binding domain, e.g., an antigenic determining variable region of an intact antibody, that is sufficient to confer recognition and specific binding of the antibody fragment to a target, such as an antigen. Examples of antibody fragments include, but are not limited to, Fab, Fab′, F(ab′)₂, and Fv fragments, scFv antibody fragments, linear antibodies, single domain antibodies such as sdAb (either W or Vu), camelid VHH domains, and multi-specific antibodies formed from antibody fragments. The term “scFv” is defined to be a fusion protein comprising at least one antibody fragment comprising a variable region of a light chain and at least one antibody fragment comprising a variable region of a heavy chain, wherein the light and heavy chain variable regions are contiguously linked via a short flexible polypeptide linker, and capable of being expressed as a single chain polypeptide, and wherein the scFv retains the specificity of the intact antibody from which it is derived. Unless specified, as used herein an scFv may have the V_{L} and V_{H} variable regions in either order, e.g., with respect to the N-terminal and C-terminal ends of the polypeptide, the scFv may comprise V_{L}-linker-V_{H} or may comprise V_{H}-linker-V_{L}.

[0039] As used herein, an “antigen” is defined to be a molecule that provokes an immune response. This immune response may involve either antibody production, or the activation of specific immunologically-competent cells, or both. The skilled artisan will understand that any macromolecule, including, but not limited to, virtually all proteins or peptides, including glycosylated polypeptides, phosphorylated polypeptides, and other post-translation modified polypeptides including polypeptides modified with lipids, can serve as an antigen. Furthermore, antigens can be derived from recombinant or genomic DNA. A skilled artisan will understand that any DNA, which comprises a nucleotide sequences or a partial nucleotide sequence encoding a protein that elicits an immune response therefore encodes an “antigen” as that term is used herein. Furthermore, one skilled in the art will understand that an antigen need not be encoded solely by a full-length nucleotide sequence of a gene. It is readily apparent that the present invention includes, but is not limited to, the use of partial nucleotide sequences of more than one gene and that these nucleotide sequences are arranged in various combinations to encode polypeptides that elicit the desired immune response. Moreover, a skilled artisan will understand that an antigen need not be encoded by a “gene” at all. It is readily apparent that an antigen can be synthesized or can be derived from a biological sample, or can be a macromolecule besides a polypeptide. Such a biological sample can include, but is not limited to a tissue sample, a tumor sample, a cell or a fluid with other biological components.

[0040] As used herein, a “complementary marker” is defined to be a marker on a target cell or in a body that interact with the markers on an EV and/or exosome. For example, complementary markers can interact with markers on the EV and/or exosome to traffic the EV and/or exosome to target, retain the EV and/or exosome at the target, or allow the EV and/or exosome to recognize a target cell.

[0041] As used herein, a “delivery vehicle” is defined to be an EV, an exosome, a microvesicle, an ectosome, a microparticle, an apoptotic body, a nanoparticle, an antibody, or other molecule that can carry a payload.

[0042] As used herein, an “effective amount” or “therapeutically effective amount” are used interchangeably, and defined to be an amount of a compound, formulation, material, or composition, as described herein effective to achieve a particular biological result.

[0043] As used herein, an “epitope” is defined to be the portion of an antigen capable of eliciting an immune response, or the portion of an antigen that binds to an antibody. Epitopes can be a protein sequence or subsequence that is recognized by an antibody.

[0044] As used herein, an “expression vector” and an “expression construct” are used interchangeably, and are both defined to be a plasmid, virus, or other nucleic acid designed for modulating protein expression in a cell. The vector or construct is used to introduce a gene into a host cell whereby the vector will interact with polymerases in the cell to express the protein encoded in the vector/construct. The expression vector and/or expression construct may exist in the cell extrachromosomally or integrate into the chromosome. When integrated into the chromosome the nucleic acids comprising the expression vector or expression construct will remain an expression vector or expression construct.

[0045] As used herein, an “extracellular vesicle” or “EV” is used interchangeably and is defined to mean cell-derived vesicle having a membrane that surrounds and encloses a central space and is produced by a cell. Membranes of EVs can be composed of a lipid bi-layer having an external surface and internal surface bounding an enclosed volume. The membrane bilayer incorporates proteins and other macromolecules derived from the cell of origin and may comprise phospholipids. The luminal space encapsulates lipids, proteins, organic molecules and macromolecules including nucleic acids and polypeptides. Examples of extracellular vesicles include exosomes, ectosome, microvesicle, microsome or other cell-derived membrane vesicles. Other cell-derived membrane vesicles include a shedding vesicle, a plasma membrane-derived vesicle, and/or an exovesicle.

[0046] An extracellular vesicle can have a longest dimension, such as a cross-sectional diameter, of at least about 20, 30, 40, 50, 60, 70, 80, 90, 100, 200, 300, 400, or 500 nm and/or at most about 1000, 500, 400, 300, 200, 100, 90, 80, 70, 60, or 50 nm. In some instances, a longest dimension of a vesicle can range from about 20 nm to about 1000 nm, about 30 nm to about 1000 nm, about 20 nm to about 100 nm, about 30 nm to about 100 nm, about 40 nm to about 100 nm, about 20 nm to about 200 nm, about 30 nm to about 200 nm, about 40 nm to about 200 nm, about 20 nm to about 120 nm, such as about 30 nm to about 120 nm, about 40 nm to about 120 nm, about 20 nm to about 300 nm, about 30 nm to about 300 nm, about 40 nm to about 300 nm, about 50 nm to about 1000 nm, about 100 nm to about 500 nm, about 500 nm to about 1000 nm, and such as about 40 nm to about 500 nm, each range inclusive. When referring to a plurality of vesicles, such ranges can represent the average of all vesicles, including naturally occurring and modified vesicles in the mix.

[0047] As used herein, an “exosome” is defined to mean a secreted membrane-enclosed vesicle that originates from the endosome compartment in cells. The exosome can comprise a bilayer membrane, and can comprise various macromolecular cargo either within the internal space, displayed on the external surface of the extracellular vesicle, and/or spanning the membrane. Cargo can comprise nucleic acids, proteins, carbohydrates, lipids, small molecules, and/or combinations thereof. The endosome compartment, or the multi-vesicular body, can fuse with the plasma membrane of the cell, with ensuing release to the extracellular space of their vesicles as exosomes. Cargos such as protein, mRNA, miRNA, tRNA, yRNA, DNA, lipids, and other ingredients derived from the derived cells can be protected from degradation by the external environment and are beneficial to their biological function of active ingredients.

[0048] Exosomes may arise as small vesicles within larger membrane structures in the endosome within a cell and have a smaller size, ranging from about 20 nm to about 120 nm, about 30 nm to about 120 nm, about 40 nm to about 120 nm, about 20 nm to about 150 nm, about 30 nm to about 150 nm, about 40 nm to about 150 nm, about 20 nm to about 200 nm, about 30 nm to about 200 nm, about 40 nm to about 200 nm, about 20 nm to about 300 nm, about 30 nm to about 300 nm, or about 40 nm to about 300 nm. Exosomes can range in size from about 20 nm to about 300 nm. Additionally, the exosome may have an average diameter in the range of about 50 nm to about 220 nm. Preferably, in a specific embodiment, the exosome has an average diameter of about 120 nm±20 nm. It has been demonstrated that almost all living cells can secrete exosomes, and exosomes widely exist in various body fluids such as blood, urine, breast milk, or cerebrospinal fluid.

[0049] As used herein, the term “average” may be mean, mode or medium for a group of measurements.

[0050] As used herein, the term “about” when used before a numerical designation, e.g., diameter, size, temperature, time, amount, concentration, and such other, including a range, indicates approximations which may vary by (+) or (−) 10%, 5% or 1%.

[0051] As used herein the singular forms “a”, “and”, and “the” include plural referents unless the context clearly dictates otherwise. Thus, for example, reference to “a cell” includes a plurality of such cells and reference to “the culture” includes reference to one or more cultures and equivalents thereof known to those skilled in the art, and so forth.

[0052] As used herein, a “hematopoietic cell” is defined to be a cell that arises from a hematopoietic stem cell. This includes but is not limited to myeloid progenitor cells, lymphoid progenitor cells, megakaryocytes, erythrocytes, mast cells, myeloblasts, basophils, neutrophils, eosinophils, macrophages, thrombocytes, monocytes, natural killer cells, T lymphocytes, B lymphocytes and plasma cells.

[0053] As used herein, “heterologous” is defined to mean the nucleic acid and/or polypeptide are not homologous to the host cell. For example, a construct is heterologous to a host cell if it contains some homologous sequences arranged in a manner not found in the host cell and/or the construct contains some heterologous sequences not found in the host cell.

[0054] As used herein, an “isopeptide bond” is defined to be an amide bond between a carboxyl group and an amino group at least one of which is not derived from a protein main chain or alternatively viewed is not part of the protein backbone. An isopeptide bond may form within a single protein or may occur between two peptides or a peptide and a protein. An isopeptide may form intramolecularly within a single protein or intermolecularly i.e. between two peptide/protein molecules. An isopeptide bond may occur between a lysine residue and an asparagine, aspartic acid, glutamine, or glutamic acid residue or the terminal carboxyl group of the protein or peptide chain or may occur between the alpha-amino terminus of the protein or peptide chain and an asparagine, aspartic acid, glutamine or glutamic acid. Proteins which are known to form isopeptide bond spontaneously are provided in Table 11 from which isopeptide domain and isopeptide tag may be isolated.

[0055] As used herein, an “isopeptide domain” is defined to be a portion of a protein that can form a spontaneous isopeptide bond with a complementary isopeptide tag and upon association with the tag. In one embodiment, the isopeptide domain can be the portion of the full-length protein that remains after excision of the isopeptide tag, where the remaining portion retains the ability to spontaneously form an isopeptide bond upon binding to the isopeptide tag. In a separate embodiment, the isopeptide domain can be the smallest portion of a full-length protein having the ability to spontaneously form an isopeptide bond upon association with a peptide fragment from the same protein. Typically, an isopeptide domain is about 8-14 kDa. Examples of isopeptide domains may be found in Table 1 (e.g., SEQ ID NOS: 1-60).

[0056] As used herein, an “isopeptide tag” is defined to be a portion of a protein that can form a spontaneous isopeptide bond with a complementary isopeptide domain and upon association with the domain. The isopeptide tag is a peptide sequence derived from a subdomain of a full-length protein that contains only one of two amino acids which in the contest of the full-length protein form an intra-chain covalent isopeptide bond between the side chains of the two amino acids or between the side chain of one amino acid and main chain amino-group at the N-terminus or carboxyl-group at the C-terminus. In an embodiment, the isopeptide tag may be a minimally sized peptide from a portion of a full-length protein able to form an intra-chain isopeptide bond, where the minimally sized peptide can associate with an isopeptide domain and form an isopeptide both with the isopeptide domain. Typically, an isopeptide tag is about 11-14 amino acids long. Examples of isopeptide tags may be found in Table 1 (e.g., SEQ ID NOS: 61-66).

[0057] As used herein, a “marker” is defined to mean a protein, lipid, carbohydrate or other molecule involved in EV trafficking and/or EV interaction with target cells. As such, a marker may be found on an EV and/or a cell. An EV and/or a cell may be characterized in part by the presence of a marker. Preferably, a marker is found on the exterior surface of an EV and/or cell. A marker may be used interchangeable with a “biomarker.”

[0058] As used herein, a “polypeptide” may be a protein or a peptide. In an embodiment, polypeptide may be a targeting protein. For example, a polypeptide may be a single chain Fv (scFv). In an embodiment, a polypeptide may be an affinity peptide. For example, an affinity peptide may target a cell surface protein, such as GPC3 (glypican-3) affinity peptide for GPC3 cell surface protein.

[0059] As used herein, the term “reporter” or “reporter molecule” refers to a moiety capable of being detected indirectly or directly. Reporters include, without limitation, a chromophore, a fluorophore, a fluorescent protein, a luminescent protein, a receptor, a hapten, an enzyme, and a radioisotope.

[0060] As used herein, the term “reporter gene” refers to a polynucleotide that encodes a reporter molecule that can be detected, either directly or indirectly. Exemplary reporter genes encode, among others, enzymes, fluorescent proteins, bioluminescent proteins, receptors, antigenic epitopes, and transporters.

[0061] “Surface domain” is a subset of the protein or polypeptide primary sequence that is exposed to the extra-EV environment. The surface domain can be a loop between two transmembrane domains or it can contain one of the termini (amino or carboxy) of the protein. Protein domain topology relative to the membrane bi-layer can be determined empirically by assessing what portions of the protein are digested by an external protease. More recently, characteristic amino acid patterns, such as basic or acidic residues in the juxta-membrane regions of the protein have been used to algorithmically assign probable topologies (extracellular versus cytosolic) to integral membrane proteins. Since EVs have the same membrane topology orientation as the plasma membrane of the whole cell (the outer leaflet of the membrane is the same between cells and EVs), these algorithms can be applied to EV resident proteins as well. As such, the surface domain of an EV localizing transmembrane protein may sometimes be referred to as an extracellular domain due to the same membrane topology of an EV and plasma membrane. For example, the “surface domain” may be a short peptide of approximately 10-15 amino acids. In an embodiment, the “surface domain” may be an unstructured polypeptide. In an embodiment, the “surface domain” is the entire surface domain of an integral membrane protein. In yet another embodiment, the “surface domain” is part or portion of the surface domain of an integral membrane protein. In an embodiment, the surface domain is amino terminal to the transmembrane domain and cytosolic domain. In an embodiment, the surface domain is at the N-terminus of the vesicle localization moiety or the chimeric vesicle localization moiety and is on the external surface of an extracellular vesicle, such as an exosome.

[0062] “Transmembrane domain” may be a span of about 18-40 aliphatic, apolar and hydrophobic amino acids that assembles into an alpha-helical secondary structure and spans from one face of a membrane bilayer to the other face, meaning that the N-terminus of the helix extends at least to and in many cases beyond the phospholipid headgroups of one membrane leaflet while the C-terminus extends to the phospholipid headgroups of the other leaflet. In an embodiment, the transmembrane domain connects an amino terminal surface domain with a carboxyl terminal cytosolic domain.

[0063] “Cytosolic domain” is a subset of the protein or polypeptide primary sequence that is exposed to the intra-EV or intracellular environment. The cytosolic domain can be a loop between two transmembrane domains or it can contain one of the termini (amino or carboxy) of the protein. Its topology is distinct from that of the transmembrane and the surface domains. In an embodiment, the cytosolic domain is in the cytoplasmic side of a cell. In another embodiment, the cytosolic domain is in the lumen of a vesicle. As such, the cytosolic domain may be also referred to as a lumenal domain or luminal domain. In an embodiment, the cytosolic domain is at the C-terminus of the vesicle localization moiety or the chimeric vesicle localization moiety.

[0064] Merely by way of example, sequences corresponding to “surface domain,” “transmembrane domain” and “cytosolic domain” for the proteins disclosed herein may be found within the description under protein accession numbers provided herein. Particularly useful examples are the proteins cataloged within UniProtKB (UniProt Release 2019_11 (11 Dec. 2019)) where under each accession number amino acid sequence along with features and functional domains are provided. For example, topological domains associated with each of the transmembrane vesicle localization moiety provided herein may be found in UniProKB accession number with the description of “extracellular” for the “surface domain,” “helical” for the “transmembrane domain” and “cytoplasmic” for the “cytosolic domain.” Amino acid sequences corresponding to “signal peptide” are also indicated as being processed out of the mature transmembrane protein. In addition, a number of other publicly available databases may also be used to identify the surface (extracellular), transmembrane and cytosolic (lumenal or cytoplasmic) domain, such as Membranome: membrane proteome of single-helix transmembrane proteins (membranome.org; Lomize, A. L. et al. (2017) Membranome: a database for proteome-wide analysis of single-pass membrane proteins. Nucleic Acids Res. 45:D250-D255 and Lomize, A. L. et al. (2018) Membranome 2.0: database for proteome-wide profiling of bitopic proteins and their dimers. Bioinformatics 34:1061-1062) and PDBTM: Protein Data Bank of Transmembrane Proteins (pdbtm.enzim.hu; PDBTM version 2021-01-08) (Kozma, D. et al. (2013) Nucleic Acids Res. 41:D524-D529). Outside of these curated publicly available databases, the classification of transmembrane proteins and identification of surface, transmembrane and cytosolic domains are reviewed in Goder, V. and Spiess, M. (2001) Topogenesis of membrane proteins: determinants and dynamics. FEBS Lett. 504:87-93; Tusnady, G. et al. (2004) Transmembrane proteins in the Protein Data Bank: identification and classification. Bioinformatics 20:2964-2972; Chou, K.-C. and Shen, H.-B. (2007) MemType-2L: A Web server for predicting membrane proteins and their types by incorporating evolution information through Pse-PSSM. Biochem. Biophys. Res. Comm. 360:339-345; Casadio R., Martelli P. L., Bartoli L., Fariselli P. (2010) Topology prediction of membrane proteins: how distantly related homologs come into play. In: Structural Bioinformatics of Membrane Proteins. Springer, Vienna. In a preferred embodiment, a “chimeric vesicle localization moiety” comprises the “surface-and-transmembrane domain” of one vesicle localization moiety and the “cytosolic domain” of a second vesicle localization moiety, wherein the two vesicle localization moieties are different and distinct proteins and are not isoforms. In an embodiment, the “chimeric vesicle localization moiety” comprises the “surface-and-transmembrane domain” of one vesicle localization moiety and the “cytosolic domain” of a second vesicle localization moiety, wherein the two vesicle localization moieties are different and distinct proteins and are not isoforms and wherein the “surface-and-transmembrane domain” may have a mutation. The mutation may be a deletion, insertion or a substitution, so long as the resulting mutant retains at least 80% or at least about 90% of the EV association activity of the unmutated counterpart. In an embodiment, the “chimeric vesicle localization moiety” is derived from combining domains of two proteins encoded by two distinct genes which are not allelic or homologs. In an embodiment, the “chimeric vesicle localization moiety” is derived from combining domains of two proteins encoded by two distinct genes which are not orthologs. In an embodiment, the “chimeric vesicle localization moiety” is derived from combining domains of two proteins encoded by two distinct genes which are not paralogs. In an embodiment, the “chimeric vesicle localization moiety” is derived from combining domains of two proteins encoded by two distinct genes which are paralogs. In an embodiment, the “chimeric vesicle localization moiety” is derived from combining domains of two proteins encoded by two nonhomologous genes. In an embodiment, the “chimeric vesicle localization moiety” is derived from combining domains of two or more proteins encoded by two or more nonhomologous genes. In an embodiment, the “chimeric vesicle localization moiety” is derived from combining domains of two or more proteins encoded by two or more nonhomologous human genes. In an embodiment, the “chimeric vesicle localization moiety” is produced from combining domains of two or more human genes encoding transmembrane proteins. In a preferred embodiment, the “chimeric vesicle localization moiety” is produced from combining two nonhomologous human genes or two human genes not placed within the same gene family, wherein the genes encode transmembrane proteins.

[0065] An “isoform” of a protein can be, e.g., a protein resulting from alternative splicing of a gene expressing the protein, a protein resulting from alternative promoter usage of a gene expressing the protein, or a degradation product of the protein.

[0066] “Surface-and-transmembrane domain” is a contiguous polypeptide containing both a domain that is exposed to extracellular or extra-EV solvent and a transmembrane domain as described above.

[0067] A “linker” may be a peptide or polypeptide with 3 to 1000 amino acids that are generally non-hydrophobic and encode no secondary structural elements such as helices or beta-sheets. Suitable examples include, but are not limited to, any of (Gly)₈, (Gly)₆, (GS)ₙ (n=1-5), (GGS)ₙ (n=1-5), (GGGS)ₙ (n=1-5), (GGGGS)ₙ (n=1-5), (GGGGGS)ₙ (n=1-5)(EAAAK)ₙ (n=1-3), A(EAAAK)₄ALEA(EAAAK)₄A, (GGGGS)ₙ (n=1-4), (Ala-Pro)ₙ (10-34 aa), cleavable linkers such as VSQTSKLTRAETVFPDV, PLGLWA, RVLAEA; EDVVCCSMSY; GGIEGRGS, TRHRQPRGWE, AGNRVRRSVG, RRRRRRRRR, GLFG, and LE.

[0068] As used herein “isolated” means a state following one or more purifying steps but does not require absolute purity. “Isolated” extracellular vesicle, exosome or composition thereof means an extracellular vesicle, exosome or composition thereof passed through one or more purifying steps that separate the vesicle, extracellular vesicle, exosome or composition from other molecules, materials or cellular components found in a mixture or outside of the vesicle, extracellular vesicle or exosome or found as part of the composition prior to purification or separation. Isolation and purification may be achieved in accordance with conventional methods of recombinant synthesis or cell free protein synthesis. Separation procedures of interest include affinity chromatography. Affinity chromatography makes use of the highly specific binding sites usually present in biological macromolecules, separating molecules on their ability to bind a particular ligand. For example, covalent bonds attach the ligand to an insoluble, porous support medium in a manner that overtly presents the ligand to the protein sample, thereby using natural biospecific binding of one molecular species to separate and purify a second species from a mixture. Antibodies may be used in affinity chromatography. Preferably a microsphere or matrix is used as the support for affinity chromatography. Such supports are known in the art and are commercially available, and include activated supports that can be combined to the linker molecules. For example, Affi-Gel supports, based on agarose or polyacrylamide are low pressure gels suitable for most laboratory-scale purifications with a peristaltic pump or gravity flow elution. Affi-Prep supports, based on a pressure-stable macroporous polymer, may be suitable for preparative and process scale applications. Isolation may also be performed using methods involving centrifugation, filtration, size exclusion chromatography and vesicle flow cytometry.

[0069] As used herein, a “vesicle localization moiety fusion protein” is a fusion protein comprising a vesicle localization moiety and a protein/peptide of interest. In an embodiment, the protein/peptide of interest is an isopeptide domain or an isopeptide tag. In an embodiment, the vesicle localization moiety fusion protein is a fusion protein comprising a vesicle localization moiety and one or more isopeptide domain(s). In another embodiment, the vesicle localization moiety fusion protein is a fusion protein comprising a vesicle localization moiety and one or more isopeptide tag(s). In another embodiment, the vesicle localization moiety fusion protein is a fusion protein comprising a vesicle localization moiety and a combination of one or more isopeptide domain(s) and isopeptide tag(s). In an embodiment, the vesicle localization moiety fusion protein is a chimeric vesicle localization moiety fusion protein. In an embodiment, the chimeric vesicle localization moiety fusion protein is a fusion protein comprising a chimeric vesicle localization moiety and one or more isopeptide domain(s). In another embodiment, the chimeric vesicle localization moiety fusion protein is a fusion protein comprising a chimeric vesicle localization moiety and one or more isopeptide tag(s). In another embodiment, the chimeric vesicle localization moiety fusion protein is a fusion protein comprising a chimeric vesicle localization moiety and a combination of one or more isopeptide domain(s) and isopeptide tag(s).

[0070] As used herein, a “protein” is a polypeptide of more than 50 amino acids.

[0071] As used herein, a “peptide” is a short polypeptide of about 2 to 50 amino acids.

[0072] As used herein, a “vesicle localization moiety” is defined to be a polypeptide that can display an isopeptide domain and/or an isopeptide tag. Vesicle localization moieties can be membrane proteins (integral or peripheral). In an embodiment, the vesicle localization moiety is a chimeric vesicle localization moiety

[0073] As used herein, a “targeting moiety” can include, but is not limited to, a small molecule, glycoprotein, polypeptide, peptide, lipid, carbohydrate, nucleic acid, nucleic acid analog (such as, antisense oligonucleotide (ASO, 2′-O-methyl (OMe), 2′-fluoro (F), and 2′-O-methoxyethyl (MOE) RNA, locked nucleic acid (LNA), constrained ethyl (cEt), phosphorodiamidate morpholinos (PMOs), phosphorothioate, and peptide nucleic acid (PNA)), ligand, aptamer, chemical compound, macromolecule or other molecules involved in EV trafficking and/or EV interaction with target cells. The targeting moiety may be displayed inside or on the outside of a vesicle membrane or may span the inner membrane, outer membrane, or both inner and other membranes. For targeting cell surface receptor, ligand, or moiety on the outside of a cell or tissue, the targeting moiety is similarly displayed on the outside of a vesicle membrane, so as to be able to bind to the targeted cell surface receptor, ligand or moiety. In an embodiment, the targeting moiety is an affinity peptide for a cell surface receptor or ligand. Examples of suitable affinity peptides include, but are not limited to, THRPPMWSPVWP (SEQ ID NO.: 194), a targeting moiety(ies) or peptide for transferrin receptor (TfR), and THVSPNQGGLPS (SEQ ID NO.: 196; also called “PEPN”), a targeting moiety(ies) or peptide for glypican-3 (GPC3). Additional examples include CLVSGGMAC (SEQ ID NO.: 158), CLVSGCNTC (SEQ ID NO.: 160), CDLVSGYGC (SEQ ID NO.: 162), CLVSTSATC (SEQ ID NO.: 164), CTALVSQTC (SEQ ID NO.: 166), CWLVSGIGC (SEQ ID NO.: 168), CLVSSVFPC (SEQ ID NO.: 170), CPSLVSSVC (SEQ ID NO.: 172), CGVSLVSTC (SEQ ID NO.: 174), CQLVSGEPC (SEQ ID NO.: 176), CNLVSRRLC (SEQ ID NO.: 178), CLVSWRGSC (SEQ ID NO.: 180), CDHFLVSPC (SEQ ID NO.: 182), CGRGLVSLC (SEQ ID NO.: 184), CFPVALVSC (SEQ ID NO.: 186), CRWSSLVSC (SEQ ID NO.: 188), CWSKSLVSC (SEQ ID NO.: 190) and CPGRSLVSC (SEQ ID NO.: 192).

[0074] In another embodiment, the targeting moiety is an antibody, fragment of an antibody or a single chain Fv (scFv). Examples of scFv's include GC33 scFv (SEQ ID NO: 152), 6A6 scFv (SEQ ID NO: 154) and alaC scFv (SEQ ID NO: 156) along with their nucleic acid encoding for the scFv's as provided in Table 6. The targeting moiety may be fused to an isopeptide tag or isopeptide domain and the resulting fusion protein allowed to form an isopeptide bond with its complementary partner (e.g., complementary isopeptide domain-isopeptide tag binding and subsequent spontaneous formation of isopeptide bond between the two partners) displayed on exosomes that are “emptied” of natural cargo, “carry” a naturally occurring cargo or loaded with a payload for delivery to such as target cells or tissues.

[0075] As used herein, a “targeting moiety fusion protein” or “a fusion protein of a targeting moiety” or “targeting moiety fusion peptide” or “a fusion peptide of a targeting moiety” is a polypeptide comprising a targeting moiety and an isopeptide domain or isopeptide tag. In an embodiment, such fusion proteins or peptides may be produced by recombinant DNA methods or may be chemically synthesized.

[0076] As used herein, a “targeting moiety conjugate” or “a conjugate of a targeting moiety” is a chemical conjugate of a targeting moiety and an isopeptide domain or isopeptide tag. In an embodiment, such conjugates may be produced by chemical crosslinking or photocrosslinking of a targeting moiety and an isopeptide domain or isopeptide tag. In another embodiment, such conjugates may include an isopeptide domain or tag covalently attached to a non-polypeptide targeting moiety.

[0077] As used herein, a “single chain antibody” (scFv) is defined as an immunoglobulin molecule with function in antigen-binding activities. An antibody in scFv (single chain fragment variable) format consists of variable regions of heavy (V_{H}) and light (V_{L}) chains, which are joined together by a flexible peptide linker. Examples of scFv's as fusion proteins are provided in FIGS. 19-21.

[0078] As used herein, “transfected” or “transformed” or “transduced” are defined to be a process by which exogenous nucleic acid is transferred or introduced into a host cell. A “transfected” or “transformed” or “transduced” cell is one which has been transfected, transformed or transduced with exogenous nucleic acid. The cell includes the primary subject cell and its progeny.

### Extracellular Vesicles

[0079] The invention provides an isolated extracellular vesicle (e.g., exosome) or composition thereof, which comprises a fusion protein comprising a vesicle localization moiety and one or more isopeptide domain(s). Alternatively, in some embodiments, an extracellular vesicle (e.g., exosome) or composition thereof comprises a fusion protein comprising a vesicle localization moiety and one or more isopeptide tag(s). In some embodiments, an extracellular vesicle (e.g., exosome) or composition comprises a combination of two or more vesicle localization moiety fusion proteins, wherein each vesicle localization moiety fusion protein comprises a vesicle localization moiety and one or more isopeptide domain(s) and wherein at least two different vesicle localization moiety fusion proteins exist in the extracellular vesicle or composition. In some embodiments, an extracellular vesicle (e.g., exosome) or composition comprises a combination of two or more vesicle localization moiety fusion proteins, wherein each vesicle localization moiety fusion protein comprises a vesicle localization moiety and one or more isopeptide tag(s) and wherein at least two different vesicle localization moiety fusion proteins exist in the extracellular vesicle or composition. In an embodiment, the isolated extracellular vesicle (e.g., exosome) or composition comprises a fusion protein comprising a vesicle localization moiety and one or more isopeptide domain(s) and additionally a post-translational modification site in the fusion protein so as to increase stability of the vesicle localization moiety fusion protein. In an embodiment, the post-translational modification site is a glycosylation site in the fusion protein.

[0080] In a preferred embodiment, an extracellular vesicle (e.g., exosome) comprises a fusion protein comprising a vesicle localization moiety and one or more isopeptide domain(s).

[0081] In some embodiments, an isolated composition comprises an extracellular vesicle or exosome comprising a fusion protein comprising a vesicle localization moiety and one or more isopeptide domain(s). Alternatively, in some embodiments, an isolated composition comprises an extracellular vesicle or exosome comprising a fusion protein comprising a vesicle localization moiety and one or more isopeptide tag(s). In some embodiments, an isolated composition comprises an extracellular vesicle or exosome comprising a combination of two or more vesicle localization moiety fusion proteins, wherein each vesicle localization moiety fusion protein comprises a vesicle localization moiety and one or more isopeptide domain(s) and wherein at least two different vesicle localization moiety fusion proteins exist in the extracellular vesicle or exosome. In some embodiments, an isolated composition comprises an extracellular vesicle or exosome comprising a combination of two or more vesicle localization moiety fusion proteins, wherein each vesicle localization moiety fusion protein comprises a vesicle localization moiety and one or more isopeptide tag(s) and wherein at least two different vesicle localization moiety fusion proteins exist in the extracellular vesicle or exosome.

[0082] In a preferred embodiment, an isolated composition comprises an extracellular vesicle or exosome comprising a fusion protein comprising a vesicle localization moiety and one or more isopeptide domain(s).

[0083] In some embodiments, an isolated extracellular vesicle (e.g., exosome) or composition thereof comprises a fusion protein comprising a vesicle localization moiety and one or more isopeptide bond(s). In some embodiments, an isolated extracellular vesicle (e.g., exosome) or composition comprises a fusion protein comprising a vesicle localization moiety and one or more isopeptide bond(s) between an isopeptide domain and an isopeptide tag.

[0084] In some embodiments, a composition herein comprises an isolated or enriched set of vesicles that selectively target a tissue or cell of interest. Such vesicles can be loaded with a payload to be delivered to the cell or tissue of interest.

[0085] An extracellular vesicle (EV) can be a membrane that encloses an internal space. Cell-derived extracellular vesicles can be smaller than the cell from which they are derived and range in diameter from about 20 nm to 1000 nm (e.g., 20 nm to 1000 nm; 20 nm to 200 nm; 90 nm to 150 nm). Such vesicles can be created through the outward budding and fission from plasma membranes, assembled at and released from an endomembrane compartment, or derived from cells or vesiculated organelles having undergone apoptosis, and can contain organelles. They can be produced in an endosome by inward budding into the endosomal lumen resulting in intraluminal vesicles of a multivesicular body (MVB) and released extracellularly as exosomes upon fusion of the multivesicular body (MVB) with the plasma membrane. They can be derived from cells by direct and indirect manipulation that may involve the destruction of said cells. They can also be derived from a living or dead organism, an explanted tissue or organ, and/or a cultured cell.

[0086] Examples of extracellular vesicles include exosomes, ectosome, microvesicle, microsome or other cell-derived membrane vesicles. Other cell-derived membrane vesicles include a shedding vesicle, a plasma membrane-derived vesicle, and/or an exovesicle.

[0087] EVs may have a cross-sectional diameter smaller than the cell from which they are derived. EVs can have a longest dimension, such as a cross-sectional diameter, of at least about 20, 30, 40, 50, 60, 70, 80, 90, 100, 200, 300, 400, or 500 nm and/or at most about 1000, 500, 400, 300, 200, 100, 90, 80, 70, 60, or 50 nm. In some instances, a longest dimension of a vesicle can range from about 20 nm to about 1000 nm, about 30 nm to about 1000 nm, about 20 nm to about 100 nm, about 30 nm to about 100 nm, about 40 nm to about 100 nm, about 20 nm to about 200 nm, about 30 nm to about 200 nm, about 40 nm to about 200 nm, about 20 nm to about 120 nm, such as about 30 nm to about 120 nm, about 40 nm to about 120 nm, about 20 nm to about 300 nm, about 30 nm to about 300 nm, about 40 nm to about 300 nm, about 50 nm to about 1000 nm, about 500 nm to about 1000 nm, about 100 nm to about 500 nm, about 500 nm to about 1000 nm, or about 40 nm to about 500 nm, each range inclusive. When referring to a plurality of vesicles, such ranges can represent the average (e.g., mean) of all vesicles, including naturally occurring and modified vesicles in the mix.

[0088] Exosomes can be secreted membrane-enclosed vesicles that originate from the endosome compartment in cells. The endosome compartment, or the multi-vesicular body, can fuse with the plasma membrane of the cell, with ensuing release to the extracellular space of their vesicles as exosomes. Further, an exosome can comprise a bilayer membrane, and can comprise various macromolecular cargo either within the internal space, displayed on the external surface of the extracellular vesicle, and/or spanning the membrane. Cargo can comprise nucleic acids, proteins, carbohydrates, lipids, small molecules, and/or combinations thereof. Exosomes can range in size from about 20 nm to about 300 nm. Additionally, the exosome may have an average diameter in the range of about 50 nm to about 220 nm. Preferably, in a specific embodiment, the exosome has an average diameter of about 120 nm±20 nm.

[0089] In some instances, exosomes and other extracellular vesicles can be characterized and marked based on their protein compositions, such as integrins and tetraspanins. Other protein markers that are used to characterize exosomes and other extracellular vesicles (EVs) include TSG101, ALG-2 interacting protein X (ALIX), flotillin 1, and cell adhesion molecules which are derived from the parent cells in which the exosome and/or EV is formed. Similar to proteins, lipids are major components of exosomes and EVs and can be utilized to characterize them.

[0090] Further, naturally occurring exosomes can originate from the endosome and can contain proteins such as heat shock proteins (Hsp70 and Hsp90), membrane transport and fusion proteins (GTPases, Annexins and flotillin), tetraspanins (CD9, CD63, CD81, and CD82) and proteins such as CD47. Among these proteins, heat shock proteins, annexins, and proteins of the Rab family can abundantly be detected in exosomes and can be involved in their intracellular assembly and trafficking. Tetraspanins, a family of transmembrane proteins, can also be detected in exosomes. In a cell, tetraspanins can mediate fusion, cell migration, cell-cell adhesion, and signaling. Other abundant proteins found in exosomes can be the integrins, which can be adhesion molecules that can facilitate cell binding to the extracellular matrix. Integrins can be involved in adhering the vesicles to their target cells. Certain proteins that can be found on the surface of exosomes, such as CD55 and CD59, can protect exosomes from lysis by circulating immune cells, while CD47 on exosomes can act as an anti-phagocytic signal that blocks the uptake of exosomes by immune cells. Other proteins that can be associated with exosomes include thrombospondin, lactadherin, ALIX (also known as PDCD6IP), TSG1012, and SDCB1. Classes of membrane proteins that can naturally occur on the surface of exosomes and other extracellular vesicles include ICAMs, MHC Class I, LAMP2, lactadherin (C1C2 domain), tetraspannins (CD63, CD81, CD82, CD53, and CD37), Tsg101, Rab proteins, integrins, Alix, and lipid raft-associated proteins such as glycosylphosphatidylinositol (GPI)-modified proteins and flotillin.

[0091] Besides proteins, exosomes are also rich in lipids, with different types of exosomes containing different types of lipids. The lipid bilayer of exosomes can be constituted of cell plasma membrane types of lipids such as sphingomyelin, phosphatidylcholine, phosphatidylethanolamine, phosphatidylserine, monosialotetrahexosylganglioside (GM3), and phosphatidylinositol. Sphingomyeline and GM3 are responsible for determining the exosomes rigidity while phosphatidylserine is expressed on the plasma membrane of exosomes through different types of phospholipid transportation enzymes. Phosphatidylserine is involved in docking outer proteins, allowing the signaling and fusion of the exosome to the plasma membrane. Other types of lipids that can be found in exosomes are cholesterol, ceramide, and phosphoglycerides, along with saturated fatty-acid chains. Additional optional constituents of exosomes include nucleic acids such as micro RNA (miRNA), messenger RNA (mRNA), and non-coding RNAs. Exosomes can also contain a sugar (e.g. a simple sugar, polysaccharide, or glycan) or other molecules.

### Engineered Extracellular Vesicles

[0092] EVs and/or exosomes can be engineered to display markers that provide a desired function and/or property to the EV and/or exosome. In an embodiment, the EV and/or exosome is engineered to have an isopeptide domain on a membrane protein of the EV and/or exosome so that the isopeptide domain is displayed on the outside of the EV and/or exosome where it can react with an isopeptide tag. The isopeptide tag can be fused or conjugated to a variety of different molecules that can impart desired function and/or properties to the EV and/or exosome. For example, the molecule (e.g., targeting moiety) with the isopeptide tag could recognize a target molecule (e.g., a cell and/or tissue marker) on a target cell and/or target tissue. Such molecules could be attached to the EV and/or exosome by the isopeptide tag and so provide the EV and/or exosome with targeting capability for the desired target cell and/or target tissue (e.g., targeting moiety fusion protein or conjugate, wherein the targeting moiety is an affinity peptide or scFv to a marker expressed on a target cell or tissue). Binding of the isopeptide tag by the isopeptide domain results in formation of an isopeptide bond resulting in attachment of the molecule or targeting moiety to the external surface of an EV and/or exosome. Other properties that can be introduced to the EV and/or exosome by the molecule with the isopeptide tag include, for example, therapeutic entities including oligonucleotides, proteins and small molecules or combinations thereof that convey a therapeutic impact to recipient cells and tissues. In an embodiment, the membrane protein of the EV and/or exosome is a VLM or chimeric VLM.

[0093] Without being bound by any theory, a “vesicle localization moiety” (also referred to as a vesicle targeting moiety, a scaffold or “VLM”) may be a macromolecule that localizes at an extracellular vesicle. In an embodiment, the vesicle localization moiety is a polypeptide. In an embodiment, the vesicle localization moiety is a protein. In an embodiment, the protein is a single polypeptide chain. In an embodiment, the vesicle localization moiety is a protein that localizes at an extracellular vesicle. In an embodiment, the vesicle localization moiety is a membrane protein. In a preferred embodiment, the vesicle localization moiety is a transmembrane protein comprising a surface domain, a transmembrane domain and a cytosolic domain. Localization of such a transmembrane protein at an extracellular vesicle results in the surface domain at the outer (or external) surface of the vesicle, the transmembrane domain with the lipid bilayer of the vesicle and the cytosolic domain in the lumen (or interior) of the vesicle. Because of topological equivalence, a surface domain may also be referred to as an extracellular domain, since the surface domain on the surface of an exosome shares the same topological state as plasma membrane bound transmembrane protein on the surface of a cell; similarly, a cytosolic domain may be referred to as a lumenal domain, since part of the cytoplasm where the cytosolic domain initially resides is incorporated into the lumen of a vesicle produced by inward budding of an endosomal membrane to eventually produce multiple intraluminal vesicles of a multivesicular body (MVB) prior to secretion of the vesicles as exosomes upon fusion of the MVB with the plasma membrane of an EV producer cell.

[0094] In an embodiment, the vesicle localization moiety may be a single pass transmembrane protein. Merely by way of example, the single pass transmembrane protein may comprise an amino-terminal surface domain and a carboxyl-terminal cytosolic domain (lumenal domain) joined by a transmembrane domain. For example, nascent or newly synthesized single pass transmembrane protein may additionally comprise a signal peptide (or signal sequence) preceding the surface domain, which is cleaved by a signal peptidase upon translocation of the nascent protein into a membrane, such as endoplasmic reticulum in eukaryotes or plasma membrane in prokaryotes. In another embodiment, the nascent or newly synthesized transmembrane protein may be processed to a mature transmembrane protein which lacks a signal peptide of the nascent or newly synthesized transmembrane protein.

[0095] In one example, the single pass transmembrane protein is a type I transmembrane protein. In an embodiment, the single pass, type I transmembrane protein comprises an amino-terminal surface domain and a carboxyl-terminal cytosolic domain (lumenal domain) joined by a transmembrane domain. In another embodiment, nascent or newly synthesized single pass, type I transmembrane protein additionally comprises a signal peptide preceding the surface domain, which is cleaved by a signal peptidase upon translocation of the nascent protein into a membrane, such as endoplasmic reticulum in eukaryotes or plasma membrane in prokaryotes. In yet another embodiment, the nascent or newly synthesized single pass, type I transmembrane protein is processed to a mature single pass, type I transmembrane protein which lacks a signal peptide of the nascent or newly synthesized single pass, type I transmembrane protein. In a preferred embodiment, the nascent or newly synthesized single pass, type 1 transmembrane protein may be processed to a mature single pass, type I transmembrane protein which lacks a signal peptide of the nascent or newly synthesized single pass, type I transmembrane protein.

[0096] The vesicle localization moiety may have a surface domain, a transmembrane domain and a cytosolic domain. Such protein domains are known in the art and are well annotated and defined for the proteins described, herein, in the figures and in annotations associated with Accession Numbers from publicly available databases, referred herein, such as UniProtKB (UniProt Release 2019_11 (11 Dec. 2019); The UniProt Consortium (2019) UniProt: a worldwide hub of protein knowledge. Nucleic Acids Res. 47:D506-515) and Genome Reference Consortium Human Build 38 patch release 13 (GRCh38.p13; GenBank assembly accession GCA_000001405.28 and RefSeq assembly accession GCF_000001405.39. Examples of surface domain (SEQ ID NO: 130 (Lamp2) and 136 (CSTN1)), transmembrane domain (SEQ ID NO: 132 (lamp2) and 138 (CSTN1)) and cytosolic domain (SEQ ID NO: 134 (Lamp2), 140 (CSTN1), 142 (PTGFRN), 144 (ITGA3), 146 (IL3RA), 148 (SELPL) and 150 (ITGB1)) may be found in Table 5 along with their nucleic acid coding sequences.

[0097] In an embodiment of the invention, the vesicle localization moiety is produced in a eukaryotic cell, preferably a mammal and most preferably a human.

[0098] A “chimeric vesicle localization moiety” or “chimeric VLM” is a vesicle localization moiety which may be produced by substituting one vesicle localization moiety domain with another vesicle localization moiety domain, so as to produce a chimeric vesicle localization moiety or chimeric VLM. A chimeric vesicle localization moiety may be obtained by combining one or more functional domains of one vesicle localization moiety with one or more functional domains of another, different vesicle localization moiety. The combination comprises portion(s) of at least two vesicle localization moieties, so as to obtain a chimeric vesicle localization moiety which is superior in its association with an EV than either of the parental vesicle localization moiety, as quantified by mean recombinant protein density on EV surface and/or fraction (or percent) of total EVs positive for the recombinant protein. In an embodiment, the chimeric vesicle localization moiety comprises a surface domain, a transmembrane domain and a lumenal or cytosolic domain of a transmembrane protein or the two parental transmembrane proteins from which it is derived. In an embodiment, the chimeric vesicle localization moiety has the same arrangement of surface domain, transmembrane domain and lumenal or cytosolic domain as described for the vesicle localization moiety, described above. Merely by way of example, a chimeric vesicle localization moiety comprising a surface-and-transmembrane domain of a first vesicle localization moiety and a cytosolic domain of a second vesicle localization moiety may interact synergistically to increase accumulation at an extracellular vesicle. This not only may improve EV localization but may also change the composition of EVs.

[0099] The chimeric vesicle localization moiety can be a single pass transmembrane protein. The chimeric vesicle localization moiety can be a type I transmembrane protein, albeit a chimeric type I transmembrane protein. The chimeric vesicle localization moiety can be a single pass, type I transmembrane protein, albeit a chimeric single pass, type I transmembrane protein. In an embodiment, the chimeric vesicle localization moiety comprises an amino-terminal surface domain and a carboxyl-terminal cytosolic domain (lumenal domain) joined by a transmembrane domain. In an embodiment, nascent or newly synthesized chimeric vesicle localization moiety additionally comprises a signal peptide preceding the surface domain, which is cleaved by a signal peptidase upon translocation of the nascent protein into a membrane, such as endoplasmic reticulum in eukaryotes or plasma membrane in prokaryotes. In an embodiment, the nascent or newly synthesized chimeric vesicle localization moiety is processed to a mature form which lacks a signal peptide of the nascent or newly synthesized transmembrane protein. In an embodiment, the nascent or newly synthesized chimeric vesicle localization moiety is processed to a mature transmembrane protein which lacks a signal peptide of the nascent or newly synthesized transmembrane protein. In an embodiment, the extracellular vesicle comprises a chimeric vesicle localization moiety which has been processed to a mature form lacking a signal peptide of a nascent or newly synthesized chimeric vesicle localization moiety, a transmembrane protein. In an embodiment, the extracellular vesicle comprises a chimeric vesicle localization moiety which has been processed to a mature form lacking a signal peptide of a nascent or newly synthesized chimeric vesicle localization moiety, a transmembrane protein. In an embodiment, the chimeric vesicle localization moiety lacking a signal peptide or mature form may be any of the chimeric vesicle localization moiety as provided in Table 4 (for example, SEQ ID NO: 116, 118, 120, 122, 124 and 126, encoded by nucleic acid SEQ ID NO: 115, 117, 119, 121, 123 and 125, respectively). In an embodiment, nucleic acid sequences provided in Table 4 for chimeric vesicle localization moieties (e.g., Table 4, SEQ ID NO: 115, 117, 119, 121, 123 and 125) may be used to produce polypeptides comprising a chimeric vesicle localization moiety (e.g., Table 7, SEQ ID NO: 210, 212 and 214; see FIGS. 16-18). Furthermore, a nucleic acid comprising a coding sequence for an isopeptide domain or isopeptide tag of interest may be fused in-frame with a coding sequence for a chimeric vesicle localization moiety as provided in Table 7 to encode for a polypeptide comprising an isopeptide domain or tag and a chimeric vesicle localization moiety (e.g., Table 7, SEQ ID NO: 209, 211 and 213). The encoded fusion when expressed in cells may additionally comprise nucleic acid sequence encoding a signal peptide sequence fused inframe at the N-terminus to permit association with cellular membrane and trafficking to form exosomes. In an embodiment, the fusion protein comprises an amino terminal signal peptide sequence, followed by one or more isopeptide domain(s) or isopeptide tag(s) and then by a chimeric vesicle localization moiety or a vesicle localization moiety. In an embodiment, the nucleic acid encodes a fusion protein comprising comprises an amino terminal signal peptide sequence, followed by one or more isopeptide domain(s) or isopeptide tag(s) and then by a chimeric vesicle localization moiety or a vesicle localization moiety.

[0100] Suitable examples of the first and/or second vesicle localization moieties may be any of ACE, ADAM10, ADAM15, ADAM9, AGRN, ALCAM, ANPEP, ANTXR2, ATP1A1, ATP1B3, BSG, BTN2A1, CALM1, CANX, CD151, CD19, CD1A, CD1B, CD1C, CD2, CD200, CD200R1, CD226, CD247, CD274, CD276, CD33, CD34, CD36, CD37, CD3E, CD40, CD40LG, CD44, CD47, CD53, CD58, CD63, CD81, CD82, CD84, CD86, CD9, CHMP1A, CHMP1B, CHMP2A, CHMP3, CHMP4A, CHMP4B, CHMP5, CHMP6, CLSTN1, COL6A1, CR1, CSF1R, CXCR4, DDOST, DLL1, DLL4, DSG1, EMB, ENG, EVI2B, F11R, FASN, FCER1G, FCGR2C, FLOT1, FLOT2, FLT3, FN1, GAPDH, GLG1, GRIA2, GRIA3, GYPA, HSPG2, ICAM1, ICAM2, ICAM3, IGSF8, IL1RAP, IL3RA, IL5RA, IST1, ITGA2, ITGA2B, ITGA3, ITGA4, ITGA5, ITGA6, ITGAL, ITGAM, ITGAV, ITGAX, ITGB1, ITGB2, ITGB3, ITGB4, ITGB5, ITGB6, ITGB7, JAG1, JAG2, KIT, LAMP2, LGALS3BP, LILRA6, LILRB1, LILRB2, LILRB3, LILRB4, LMAN2, LRRC25, LY75, M6PR, MFGE8, MMP14, MPL, MRC1, MVB12B, NECTIN1, NOMO1, NOTCH1, NOTCH2, NOTCH3, NOTCH4, NPTN, NRP1, PDCD1, PDCD1LG2, PDCD6IP, PDGFRB, PECAM1, PLXNB2, PLXND1, PROM1, PTGES2, PTGFRN, PTPRA, PTPRC, PTPRJ, PTPRO, RPN1, SDC1, SDC2, SDC3, SDC4, SDCBP, SDCBP2, SELPLG, SIGLEC7, SIGLEC9, SIRPA, SLIT2, SNF8, SPN, STX3, TACSTD2, TFRC, TLR2, TMED10, TNFRSF8, TRAC, TSG101, TSPAN14, TSPAN7, TSPAN8, TYROBP, VPS25, VPS28, VPS36, VPS37A, VPS37B, VPS37C, VPS37D, VPS4A, VPS4B, VTI1A, and VTI1B, or a variant thereof and/or a fragment thereof.

[0101] In a preferred embodiment, the cytosolic domain of one vesicle localization moiety is used to replace that of another so as to obtain a chimeric vesicle localization moiety with a surface-and-transmembrane domain of one vesicle localization moiety and a cytosolic domain of a second vesicle localization moiety. Other types of domain swapping between different vesicle localization moieties are contemplated, including chimeric vesicle localization moieties having the arrangement of ABc, AbC, Abc, aBC, aBc and abC, where A, B and C correspond to the surface domain, transmembrane domain and cytosolic domain, respectively, of a first vesicle localization moiety and a, b, and c correspond to the surface domain, transmembrane domain and cytosolic domain, respectively, of a second vesicle localization moiety. Similarly, for any chimeric vesicle localization moiety with surface domain, transmembrane domain and cytosolic domain, obtained by combining domains from about 3 or 4 distinct vesicle localization moieties, the possible number of chimeric vesicle localization moieties contemplated are about 24 and 60, respectively.

[0102] While the desired chimeric vesicle localization moieties are ones with superior localization to EVs (over parental vesicle localization moieties contributing to the chimeric vesicle localization moiety), it is also contemplated that some of these chimeric vesicle localization moieties may have desirable qualities other than ability to associate with or be incorporated as part of an EV. In a preferred embodiment, the chimeric vesicle localization moiety comprises a surface-and-transmembrane domain of a first (1^{st}) vesicle localization moiety and a cytosolic domain of a second (2^{nd}) vesicle localization moiety, which is a full-length surface-and-transmembrane domain of the 1^{st} vesicle localization moiety and a full-length cytosolic domain of a 2^{nd} vesicle localization moiety. In a preferred embodiment, the surface domain and transmembrane domain are contiguous derived from a 1^{st} vesicle localization moiety and a cytosolic domain from a 2^{nd} vesicle localization moiety.

[0103] In a separate embodiment, the chimeric vesicle localization moiety comprises a surface domain or portion thereof and a transmembrane domain or portion thereof of a 1^{st} vesicle localization moiety and a cytosolic domain or portion thereof of a 2^{nd} vesicle localization moiety. In a separate embodiment, the chimeric vesicle localization moiety comprises a surface domain or portion thereof, a transmembrane domain or portion thereof, and a cytosolic domain or portion thereof, where each domain is chosen from two or more vesicle localization moieties.

[0104] In the practice of the invention, a chimeric vesicle localization moiety may be used in place of a vesicle localization moiety, because of advantageous qualities of a chimeric vesicle localization moiety. The advantageous qualities include improved association with an EV or exosome resulting in a greater fraction of the EV or exosomes comprising a chimeric vesicle localization moiety and/or greater concentration of a chimeric VLM at an EV or exosome. Other advantageous qualities, while not limiting, include improved desired composition of EV or exosome composition, improved stability, improved size, improved targeting, improved trafficking and improved isopeptide bond formation. In an embodiment, chimeric VLM or VLM are used in the present invention as fusion proteins to one or more isopeptide domain(s) and/or isopeptide tag(s).

[0105] Alternatively, in an embodiment, EV and/or exosome may be engineered to have an isopeptide tag on a membrane protein of the EV and/or exosome so that the isopeptide tag is displayed on the outside of the EV and/or exosome where it can react with an isopeptide domain. The isopeptide domain can be fused or conjugated to a variety of different molecules, such as targeting moieties, that can impart desired function and/or properties to the EV and/or exosome. Such molecules could be attached to the EV and/or exosome by the isopeptide domain and so provide the EV and/or exosome with targeting capability for the desired target cell and/or target tissue (e.g., targeting moiety fusion protein or conjugate, wherein the targeting moiety is an affinity peptide or scFv to a marker expressed on a target cell or tissue). Binding of the isopeptide tag by the isopeptide domain results in formation of an isopeptide bond resulting in attachment of the molecule or targeting moiety to the external surface of an EV and/or exosome. Other properties that can be introduced to the EV and/or exosome by the molecule with the isopeptide domain include, for example, therapeutic entities including oligonucleotides, proteins and small molecules or combinations thereof that convey a therapeutic impact to recipient cells and tissues. In an embodiment, the membrane protein of the EV and/or exosome is a VLM or chimeric VLM.

[0106] Alternatively, it is contemplated that an isopeptide tag or isopeptide domain may be fused to other positions within a transmembrane protein (such as a VLM or chimeric VLM). While presence of an isopeptide tag or isopeptide domain N-terminal to a surface domain or transmembrane domain of a modified EV or exosome and isopeptide bond formation to a fusion protein, fusion peptide or conjugate comprising a molecule with a desired functionality or property and a complementary isopeptide domain or isopeptide tag, respectively, can confer a desired functionality or property external to the EV or exosome, the isopeptide tag or domain may be positioned adjacent to the transmembrane domain or within the transmembrane domain to introduce desired functionality or property to the external leaf or internal leaf of a lipid bilayer of the EV or exosome. Similarly, the isopeptide tag or domain may be positioned C-terminal to the transmembrane domain or cytosolic domain of a transmembrane protein (e.g., VLM or chimeric VLM) so as to introduce a desired functionality or property to the lumen of an EV or exosome. Binding to a fusion protein, fusion peptide or conjugate comprising a complementary isopeptide domain or isopeptide tag and a molecule comprising a desired functionality or property and subsequent formation of an isopeptide bond results in introduction of a desired functionality or property to the modified EV or exosome.

[0107] In a preferred embodiment, the isopeptide domain or isopeptide tag is positioned N-terminal to a surface domain or transmembrane domain of a transmembrane protein (such as a VLM or chimeric VLM) of an EV or exosome. In a preferred embodiment, the isopeptide domain or isopeptide tag may be fused to a transmembrane protein (such as a VLM or chimeric VLM) of an EV or exosome and is external to the EV or exosome.

[0108] Isopeptide bonds are amide bonds formed between carboxyl/carboxamide and amino groups, where at least one of the carboxyl or amino groups is outside of the protein main-chain (the backbone of the protein). Such bonds can be chemically irreversible under biological conditions and they are resistant to most proteases. Bond formation can be enzyme catalyzed, for example by transglutaminase enzymes, where the resulting bonds function to stabilize extracellular matrix structures or to strengthen blood clots, or isopeptide bonds may form spontaneously as has been identified in HK97 bacteriophage capsid formation and Gram-positive bacterial pili. Spontaneous isopeptide bond formation has been proposed to occur after protein folding, through nucleophilic attack of the epsilon-amino group from a lysine on the C-gamma-group of an asparagine, promoted by a nearby glutamate.

[0109] Proteins which are capable of spontaneous isopeptide bond formation can be used to make isopeptide tag/isopeptide domain partner pairs which covalently bind to each other and which hence provide irreversible interactions. In this respect, proteins which are capable of spontaneous isopeptide bond formation may be expressed as separate fragments, to give an isopeptide tag and an isopeptide domain partner for the isopeptide tag, where the two fragments are capable of covalently reconstituting by isopeptide bond formation. This covalent reaction through an isopeptide bond makes the peptide-protein interaction stable under conditions where non-covalent interactions would rapidly dissociate—over long times (e.g. weeks), at high temperature (to at least 95° C.), at high force, or with harsh chemical treatment (e.g. pH 2-11, organic solvent, detergents or denaturants). An isopeptide tag may comprise one or more residues involved in the isopeptide bond in the original protein and the isopeptide domain partner may comprise the other residue(s) involved in the isopeptide bond in the original protein. In this way, it is possible to use a peptide tag developed from a protein capable of isopeptide bond formation to engineer a protein of interest using the isopeptide domain with its partner isopeptide tag fused to two molecules that it is desired to fuse together.

[0110] An isopeptide tag and isopeptide domain pair may comprise fragments of an isopeptide protein or sequences which are homologous to such fragments e.g. which have at least 50, 60, 70, 80 or 90% identity thereto, which are able to covalently bind to one another e.g. by forming an isopeptide bond. Nucleic acid and amino acid sequence of exemplary isopeptide domains (SEQ ID NO: 1-60) and isopeptide tags (SEQ ID NO: 61-66) are provided in Table 1.

[0111] In an embodiment, an isopeptide tag may comprise a peptide that has at least 80% amino acid sequence identity to any of the isopeptide tag sequences provided herein. In an embodiment, an isopeptide domain may comprise a peptide that has at least 80% amino acid sequence identity to any of the isopeptide domain sequences provided herein. In another embodiment, an isopeptide domain may comprise a peptide that has at least 80% amino acid sequence identity to a portion of any of the isopeptide domain sequences provided herein, wherein the portion comprises at least 10 contiguous amino acids inclusive of the reactive amino acid that participates in isopeptide bond formation and forms an isopeptide bond. In another embodiment, an isopeptide domain may comprise a peptide that has at least 80% amino acid sequence identity to a portion of any of the isopeptide domain sequences provided herein, wherein the portion comprises at least 15 contiguous amino acids inclusive of the reactive amino acid that participates in isopeptide bond formation and forms an isopeptide bond. In another embodiment, an isopeptide domain may comprise a peptide that has at least 80% amino acid sequence identity to a portion of any of the isopeptide domain sequences provided herein, wherein the portion comprises between 10 to 20 contiguous amino acids inclusive of the reactive amino acid that participates in isopeptide bond formation and forms an isopeptide bond.

[0112] In an embodiment, an isopeptide tag may comprise a peptide that has at least 90% amino acid sequence similarity to any of the isopeptide tag sequences provided herein. In an embodiment, an isopeptide domain may comprise a peptide that has at least 90% amino acid sequence similarity to any of the isopeptide domain sequences provided herein. In another embodiment, an isopeptide domain may comprise a peptide that has at least 90% amino acid sequence similarity to a portion of any of the isopeptide domain sequences provided herein, wherein the portion comprises at least 10 contiguous amino acids inclusive of the reactive amino acid that participates in isopeptide bond formation and forms an isopeptide bond. In another embodiment, an isopeptide domain may comprise a peptide that has at least 90% amino acid sequence similarity to a portion of any of the isopeptide domain sequences provided herein, wherein the portion comprises at least 15 contiguous amino acids inclusive of the reactive amino acid that participates in isopeptide bond formation and forms an isopeptide bond. In another embodiment, an isopeptide domain may comprise a peptide that has at least 90% amino acid sequence similarity to a portion of any of the isopeptide domain sequences provided herein, wherein the portion comprises between 10 to 20 contiguous amino acids inclusive of the reactive amino acid that participates in isopeptide bond formation and forms an isopeptide bond.

[0113] Alternatively, an isopeptide domain may be developed from an isopeptide protein and a corresponding isopeptide tag which covalently binds thereto may be identified by screening a peptide library. The isopeptide tag and isopeptide domain fragments can each comprise an amino acid residue from the isopeptide protein which was involved in the spontaneously formed isopeptide bond. Each isopeptide bond generally forms between 2 reactive residues and thus an isopeptide tag and isopeptide domain pair which covalently bind to each other, can each comprise one of the reactive residues involved in the isopeptide bond. In this way, the isopeptide tag and isopeptide domain fragments can bind together by spontaneously forming an isopeptide bond between the reactive residue present in the isopeptide tag and the reactive residue present in the isopeptide domain. The amino acids involved in forming a spontaneous isopeptide bond can be lysine, glutamate and asparagine/aspartate and the isopeptide tag can comprise one of these residues and the isopeptide domain can comprise the other residue. In an embodiment, isopeptide bond is formed between a lysine amino acid and an aspartic amino acid or an asparagine amino acid.

[0114] In order for an isopeptide bond to form, the reactive residues e.g. the reactive lysine and asparagine residues (and particularly the relevant atoms thereof; for lysine the C-epsilon atom and for asparagine the C-gamma atom) should be positioned in close proximity to one another in space e.g. in the folded isopeptide protein. The reactive residues, e.g., the lysine and asparagine (and particularly the relevant atoms thereof) are within 4 Angstrom of each other in the folded protein and may be within 3.8, 3.6, 3.4, 3.2, 3.0, 2.8, 2.6, 2.4, 2.2, 2.0, 1.8 or 1.6 Angstrom of each other. The reactive residues (and more particularly their relevant atoms) may be within 1.81, 2.63 or 2.60 Angstrom of each other.

[0115] Examples of known proteins capable of spontaneously forming one or more isopeptide bonds include Spy0128 (Kang et al, Science, 2007, 318(5856), 1625-8, which is incorporated by reference in its entirety for all purposes), Spy0125 (Pointon et al, J. Biol. Chem., 2010, 285(44), 33858-66, which is incorporated by reference in its entirety for all purposes) and FbaB (Oke et al, J. Struct Funct Genomics, 2010, 11(2), 167-80, which is incorporated by reference in its entirety for all purposes) from Streptococcus pyogenes, Cna of Staphylococcus aureus (Kang et al, Science, 2007, 318 (5856), 1625-8, which is incorporated by reference in its entirety for all purposes), the ACE19 protein of Enterococcus faecalis (Kang et al, Science, 2007, 318(5856), 1625-8, which is incorporated by reference in its entirety for all purposes), the BcpA pilin from Bacillus cereus (Budzik et al, PNAS USA, 2007, 106(47), 19992-7, which is incorporated by reference in its entirety for all purposes), the minor pilin GBS52 from Streptococcus agalactiae (Kang et al, Science, 2007, 318(5856), 1625-8, which is incorporated by reference in its entirety for all purposes), SpaA from Corynebacterium diphtheriae (Kang et al, PNAS USA, 2009, 106(40), 16967-71, which is incorporated by reference in its entirety for all purposes), SpaP from Streptococcus mutans (Nylander et al, Acta Crystallogr Sect F Struct Biol Cryst Commum., 2011, 67(Pt1), 23-6, which is incorporated by reference in its entirety for all purposes), RrgA (Izore et al, Structure, 2010, 18(1), 106-15), RrgB (El Mortaji et al, J. Biol. Chem., 2010, 285(16), 12405-15, which is incorporated by reference in its entirety for all purposes) and RrgC (El Mortaji et al, J. Biol. Chem., 2010, 285(16), 12405-15, which is incorporated by reference in its entirety for all purposes) from Streptococcus pneumoniae, SspB from Streptococcus gordonii (Forsgren et al, J Mol Biol, 2010, 397(3), 740-51, which is incorporated by reference in its entirety for all purposes). Table 11 provides a list of isopeptide proteins which can spontaneously form an isopeptide bond and which can be used to obtain isopeptide domain and complementary isopeptide tag. Such isopeptide domain and complementary tag may be minimal in amino acid length and may be optimized for efficient isopeptide bond formation. As discussed above, any of these proteins may hence be used as an isopeptide tag/isopeptide domain pair.

[0116] Isopeptide domains that can be used herein include, for example, those of SEQ ID NO. 2, 4, 6, 8, 10, 12, 14, 16, 18, 20, 22, 26, 28, 30, 32, 36, 38, 40, 42, 46, 48, 50, 52, 56, 58, 60. Isopeptide tags that can be paired with the isopeptide domains include, for example, those of SEQ ID NO. 62, 64, 66. Pairs of isopeptide domains and isopeptide tags can include, for example, one of the isopeptide domains of SEQ ID NO: 2, 4, 6, 8, 10, 12, 14, 16, 18, 20, 22, 26, 28, 30, 32, 36, 38, 40, 42, 46, 48, 50, 52, paired with one of the isopeptide tags of SEQ ID NO: 62; one of the isopeptide domains of SEQ ID NO: 56, 58 paired with one of the isopeptide tags of SEQ ID NO: 64; and one of the isopeptide domains of SEQ ID NO: 60 paired with one of the isopeptide tags of SEQ ID NO: 66. Examples of isopeptide domains follow (with reactive amino acid participating in isopeptide bond formation underlined).

(SEQ ID NO: 2)
GAMVDTLSGLSSEQGQSGDMTIEEDSATHIKFSKRDEDGKELAGATMEL
RDSSGKTISTWISDGQVKDFYLYPGKYTFVETAAPDGYEVATAITFTVN
EQGQVTVNGKATKGDAHI
(SEQ ID NO: 4)
AMVDTLSGLSSEQGQSGDMTIEEDSATHIKFSKRDEDGKELAGATMELR
DSSGKTISTWISDGQVKDFYLYPGKYTFVETAAPDGYEVATAITFTVNE
QGQVTVNGKATKGDAHI
(SEQ ID NO: 6)
MVDTLSGLSSEQGQSGDMTIEEDSATHIKFSKRDEDGKELAGATMELRD
SSGKTISTWISDGQVKDFYLYPGKYTFVETAAPDGYEVATAITFTVNEQ
GQVTVNGKATKGDAHI
(SEQ ID NO: 8)
VDTLSGLSSEQGQSGDMTIEEDSATHIKFSKRDEDGKELAGATMELRDS
SGKTISTWISDGQVKDFYLYPGKYTFVETAAPDGYEVATAITFTVNEQG
QVTVNGKATKGDAHI
(SEQ ID NO: 10)
VDTLSGLSSEQGQSGDMTIEEDSATHIKFSKRDEDGKELAGATMELRDS
SGKTISTWISDGQVKDFYLYPGKYTFVETAAPDGYEVATAITFTVNEQG
QVTVNGKATKGDAHID
(SEQ ID NO: 12)
VDTLSGLSSEQGQSGDMTIEEDSATHIKFSKRDEDGKELAGATMELRDS
SGKTISTWISDGQVKDFYLYPGKYTFVETAAPDGYEVATAITFTVNEQG
QVTVNGKATKG
(SEQ ID NO: 14)
VDTLSGLSSEQGQSGDMTIEEDSATHIKESKRDEDGKELAGATMELRDS
SGKTISTWISDGQVKDFYLYPGKYTFVETAAPDGYEVATAITFTVNEQG
QVTVNGKATK
(SEQ ID NO: 16)
VDTLSGLSSEQGQSGDMTIEEDSATHIKFSKRDEDGKELAGATMELRDS
SGKTISTWISDGQVKDFYLYPGKYTFVETAAPDGYEVATAITFTVNEQG
QVTVNGKATKGDA
(SEQ ID NO: 18)
VDTLSGLSSEQGQSGDMTIEEDSATHIKFSKRDEDGKELAGATMELRDS
SGKTISTWISDGQVKDFYLYPGKYTFVETAAPDGYEVATAITFTVNEQG
QVTVNGKATKGDAH
(SEQ ID NO: 20)
DTLSGLSSEQGQSGDMTIEEDSATHIKFSKRDEDGKELAGATMELRDSS
GKTISTWISDGQVKDFYLYPGKYTFVETAAPDGYEVATAITFTVNEQGQ
VTVNGKATKGDAHI
(SEQ ID NO: 22)
DSATHIKFSKRDEDGKELAGATMELRDSSGKTISTWISDGQVKDFYLYP
GKYTFVETAAPDGYEVATAITFTVNEQGQVTVNGKATKGDAHI
(SEQ ID NO: 26)
AMVDTLSGLSSEQGQSGDMTIEEDSATHIKFSKRDEDGKELAGATMELR
DSSGKTISTWISDGQVKDFYLYPGKYTFVETAAPDGYEVATAITFTVNE
QGQVTVNGKATKGDAHID
(SEQ ID NO: 28)
VDTLSRLSSEQGQSGDMTIEEDSATHIKFSKRDEDGKELAGATMELRDS
SGKTISTWISDGQVKDFYLYPGKYTFCRNRSTRRYGGSTAIPYSMEQGQ
VTVMASN
(SEQ ID NO: 30)
DSATHIKFSKRDEDGKELAGATMELRDSSGKTISTWISDGQVKDFYLYP
GKYTFVETAAPDGYEVATAITFTVNEQGQVTVNGKATK
(SEQ ID NO: 32)
DSATHIKFSKRDEDGKELAGATMELRDSSGKTISTWISDGQVKDFYLYP
GKYTFVETAAPDGYEVATAITFTVNEQGQVTVNG
(SEQ ID NO: 36)
DSATHIKFSKRDIDGKELAGATMELRDSSGKTISTWISDGQVKDFYLMP
GKYTFVETAAPDGYEVATAITFTVNEQGQVTVNGKATKGDAHAVMVAA
(SEQ ID NO: 38)
DSATHIKFSKRDEDGKELAGATMELRDSSGKTISTWISDGQVKDFYLYP
GKYTFVETAAPDGYEVATAITFTVNEQGQVTVNGKATKG
(SEQ ID NO: 40)
VDTLSGLSSEQGQSGDMTIEEDSATHIKFSKRDEDGKELAGATMELRDS
SGKTISTWISDGQVKDFYLYPGKYTFVETAAPDGYEVATAITFTVNEQG
QVTVNGLE
(SEQ ID NO: 42)
MVDTLSGLSSEQGQSGDMTIEEDSATHIKFSKRDEDGKELAGATMELRD
SSGKTISTWISDGQVKDFYLYPGKYTFVETAAPDGYEVATAITFTVNEQ
GQVTVNGKATK
(SEQ ID NO: 46)
VTTLSGLSGEQGPSGDMTTEEDSATHIKFSKRDEDGRELAGATMELRDS
SGKTISTWISDGHVKDFYLYPGKYTFVETAAPDGYEVATAITFTVNEQG
QVTVNGEATKGDAHT
(SEQ ID NO: 48)
MTIEEDSATHIKFSKRDEDGKELAGATMELRDSSGKTISTWISDGQVKD
FYLYPGKYTFVETAAPDGYEVATAITFTVNEQGQVT
(SEQ ID NO: 50)
IETEQNLPNEDGQSGNIIEQEDSKTLVKFSKRDIKGNELAGATIELRDL
SGKSIQSWVSDGKAKDFYLLPGSYEFVETAAPEGYQIATKIMFTISTDG
RITVDGQLV
(SEQ ID NO: 52)
EEDSATHIKFSKRDEDGKELAGATMELRDSSGKTISTWISDGQVKDFYL
YPGKYTFVETAAPDGYEVATAITFTVNEQGQVTVNGKATKG
(SEQ ID NO: 56)
KPLRGAVFSLQKQHPDYPDIYGAIDQNGTYQNVRTGEDGKLTFKNLSDG
KYRLFENSEPAGYKPVQNKPIVAFQIVNGEVRDVTSIVPQDIPATYEFT
NGKHYITNEPIPPK
(SEQ ID NO: 58)
GSHMKPLRGAVFSLQKQHPDYPDIYGAIDQNGTYQNVRTGEDGKLTFKN
LSDGKYRLFENSEPAGYKPVQNKPIVAFQIVNGEVRDVTSIVPQDIPAT
YEFTNGKHYITNEPIPPK
(SEQ ID NO: 60)
SSGLVPRGSHMASMTGGQQMGRGSSGLSGETGQSGNTTIEEDSTTHVKF
SKRDANGKELAGAMIELRNLSGQTIQSWISDGTVKVFYLMPGTYQFVET
AAPEGYELAAPITFTIDEKGQIWVDS.

[0117] Additional isopeptide domains include the following present as a fusion to a targeting moiety. In one example, the targeting moiety is a single chain Fv (scFv) antibody, such as a GC33 single chain Fv (scFv) antibody fragment directed against glypican-3 (GPC3) cell surface protein. In this specific example, sequences which are in bold corresponds to a heavy chain variable region of an antibody comprising complementary determining region (CDR) and framework sequences (FR) found outside the CDR sequences in the order: FR1-CDR1-FR2-CDR2-FR3-CDR3-FR4. The underlined sequences signify a linker. The sequences which are both in bold and italics signify a light chain variable region of an antibody comprising complementary determining region (CDR) and framework sequences (FR) found outside the CDR sequences in the order: FR1-CDR1-FR2-CDR2-FR3-CDR3-FR4. Sequences which are in italics signify any of an isopeptide-1, -2 or -3 domain. Sequences in lowercase letters signify an epitope sequence.

### GC33+Isopeptide Domain (Isopeptide-1)

(SEQ ID NO: 248)
QVQLVQSGAEVKKPGASVKVSCKASGYTFTDYEMHWVRQAPGQGLEWMGALDP
KTGDTAYSQKFKGRVTLTADKSTSTAYMELSSLTSEDTAVYYCTRFYSYTYWGQG
TLVTVSS
SSGGSSRSSSSGGGGSGGGG
DVVMTQSPLSLPVTPGEPASISCRSSQSLVHSNGNTYLHWYLQKPGQSPOLLIYKVSNRF
SGVPDRFSGSGSGTDETLKISRVEAEDYGVYYCSQNTHVPPTFGQGTKLEIKSGGGGSG
GGGketaaakferqhmdsDSATHIKFSKRDEDGKELAGATMELRDSSGKTISTWISDGQVKDFYLY
PGKYTFVETAAPDGYEVATAITFTVNEQGQVTVNG

[0119] The isopeptide domain (isopeptide-1) binds to Isopeptide(1) tag:

(SEQ ID NO: 62)
AHIVMVDAYKPTK.

### GC33+Isopeptide Domain (Isopeptide-2)

(SEQ ID NO: 250)
QVQLVQSGAEVKKPGASVKVSCKASGYTFTDYEMHWVRQAPGQGLEWMGALDP
KTGDTAYSQKFKGRVTLTADKSTSTAYMELSSLTSEDTAVYYCTRFYSYTYWGQG
TLVTVSS
SSGGSSRSSSSGGGGSGGGG
DVVMTQSPLSLPVTPGEPASISCRSSQSLVHSNGNTYLHWYLQKPGQSPQLLIYKVSNRF
SGVPDRFSGSGSGTDFTLKISRVEAEDVGVYYCSQNTHVPPTFGQGTKLEIKSGGGGSG
GGGeqkliseedlGSHMKPLRGAVFSLQKQHPDYPDIYGAIDQNGTYQNVRTGEDGKLTFKN
LSDGKYRLFENSEPAGYKPVQNKPIVAFQIVNGEVRDVTSIVPQDIPATYEFTNGKHYIT
NEPIPPK

[0121] The isopeptide domain (isopeptide-2) binds to isopeptide(2) tag:

(SEQ ID NO: 64)
KLGDIEFIKVNK.

### GC33+Isopeptide Domain (Isopeptide-3)

(SEQ ID NO: 252)
QVQLVQSGAEVKKPGASVKVSCKASGYTFTDYEMHWVRQAPGQGLEWMGALDP
KTGDTAYSQKFKGRVTLTADKSTSTAYMELSSLTSEDTAVYYCTRFYSYTYWGQG
TLVTVSS
SSGGSSRSSSSGGGGSGGGG
DVVMTQSPLSLPVTPGEPASISCRSSQSLVHSNGNTYLHWYLQKPGQSPQLLIYKVSNRF
SGVPDRFSGSGSGTDFTLKISRVEAEDVGVYYCSQNTHYPPTFGQGTKLEIKSGGGGSG
GGGgkpipnpllgldstSSGLVPRGSHMASMTGGQQMGRGSSGLSGETGQSGNTTIEEDSTTH
VKFSKRDANGKELAGAMIELRNLSGQTIQSWISDGTVKVFYLMPGTYQFVETAAPEGYE
LAAPITFTIDEKGQIWVDS

[0123] The isopeptide domain (isopeptide 3) binds isopeptide(3) tag: DPIVMIDNDKPIT (SEQ ID NO: 66).

[0124] Examples of isopeptide tags follow (with reactive amino acid participating in isopeptide bond formation underlined):

(SEQ ID NO: 62)
AHIVMVDAYKPTK
(SEQ ID NO: 64)
KLGDIEFIKVNK
(SEQ ID NO: 66)
DPIVMIDNDKPIT

[0125] The isopeptide tag and/or isopeptide domain may be fused to molecules that provide the EV and/or exosome with a desired function and/or property (a molecule so fused may be referred to in the application as a “molecule tag;” while a preferred embodiment is to fuse the molecule with an isopeptide tag, the molecule may also be fused to an isopeptide domain depending on the partner polypeptide which will participate in isopeptide bond formation). The molecule can be a polypeptide (such as, for example, a targeting protein, e.g., single chain Fv (scFv)), a peptide or affinity peptide (such as, for example, THVSPNQGGLPS (SEQ ID NO: 196) affinity peptide for GPC3), lipid, carbohydrate, nucleic acid, ligand, aptamer, polymer, small molecule drug, chemical compound, or other macromolecule with a desired biochemical or biophysical property. When the molecule is a protein or polypeptide, the isopeptide tag can be fused, for example, at the N- or C-terminus of such proteins or polypeptides or in an internal loop. Optionally, a linker may flank the isopeptide tag or isopeptide domain, e.g. a glycine/serine rich linker, in order to enhance accessibility for reaction. The linker may include a site for cleavage.

[0126] The isopeptide domain can be fused with a vesicle localization moiety that is present on an EV and/or exosome. Examples of vesicle localization moieties that can be fused with the isopeptide domain include, for example, ACE, ADAM10, ADAM15, ADAM9, AGRN, ALCAM, ANPEP, ANTXR2, ATP1A1, ATP1B3, BSG, BTN2A1, CALM1, CANX, CD151, CD19, CD1A, CD1B, CD1C, CD2, CD200, CD200R1, CD226, CD247, CD274, CD276, CD33, CD34, CD36, CD37, CD3E, CD40, CD40LG, CD44, CD47, CD53, CD58, CD63, CD81, CD82, CD84, CD86, CD9, CHMP1A, CHMP1B, CHMP2A, CHMP3, CHMP4A, CHMP4B, CHMP5, CHMP6, CLSTN1, COL6A1, CR1, CSF1R, CXCR4, DDOST, DLL1, DLL4, DSG1, EMB, ENG, EVI2B, F11R, FASN, FCER1G, FCGR2C, FLOT1, FLOT2, FLT3, FN1, GAPDH, GLG1, GRIA2, GRIA3, GYPA, HSPG2, ICAM1, ICAM2, ICAM3, IGSF8, IL1RAP, IL3RA, IL5RA, IST1, ITGA2, ITGA2B, ITGA3, ITGA4, ITGA5, ITGA6, ITGAL, ITGAM, ITGAV, ITGAX, ITGB1, ITGB2, ITGB3, ITGB4, ITGB5, ITGB6, ITGB7, JAG1, JAG2, KIT, LAMP2, LGALS3BP, LILRA6, LILRB1, LILRB2, LILRB3, LILRB4, LMAN2, LRRC25, LY75, M6PR, MFGE8, MMP14, MPL, MRC1, MVB12B, NECTIN1, NOMO1, NOTCH1, NOTCH2, NOTCH3, NOTCH4, NPTN, NRP1, PDCD1, PDCD1LG2, PDCD6IP, PDGFRB, PECAM1, PLXNB2, PLXND1, PROM1, PTGES2, PTGFRN, PTPRA, PTPRC, PTPRJ, PTPRO, RPN1, SDC1, SDC2, SDC3, SDC4, SDCBP, SDCBP2, SELPLG, SIGLEC7, SIGLEC9, SIRPA, SLIT2, SNF8, SPN, STX3, TACSTD2, TFRC, TLR2, TMED10, TNFRSF8, TRAC, TSG101, TSPAN14, TSPAN7, TSPAN8, TYROBP, VPS25, VPS28, VPS36, VPS37A, VPS37B, VPS37C, VPS37D, VPS4A, VPS4B, VTI1A and VTI1B or an isoform thereof, a homologue thereof, a variant thereof or a functional fragment thereof, or an exosomal polypeptide. These exemplary vesicle localization moieties are single pass membrane proteins and the isopeptide domain can be fused with or without a linker to the N-terminal portion of the vesicle localization moieties. The isopeptide domain can be at the N-terminus or at any position on the vesicle localization moiety that is outside the cell. For example, the isopeptide domain could be fused between the surface and transmembrane domains of the vesicle localization moiety, or the isopeptide domain could be fused to the vesicle localization moiety so that the isopeptide domain is displayed on a surface domain of the vesicle localization moiety in a desired manner. When the isopeptide domain may be fused to the vesicle localization moiety, linkers may be used at one or both sides of the isopeptide domain sequence.

[0127] Further, the vesicle localization moiety may be a chimeric vesicle localization moiety comprising a portion of a first vesicle localization moiety selected from the list above joined to a portion of a second vesicle localization moiety different from the first and also selected from the list above. In one embodiment, the chimeric vesicle localization moiety comprises the extracellular domain and transmembrane of a first vesicle localization moiety and the cytosolic domain of a second vesicle localization moiety. In another embodiment, the chimeric vesicle localization moiety comprises a portion of the N-terminal fragment of the first vesicle localization moiety and a portion of the C-terminal fragment of the second vesicle localization moiety, wherein the chimeric vesicle localization moiety is incorporated into extracellular vesicles and comprises an extracellular domain and a transmembrane domain. In another embodiment, the chimeric vesicle localization moiety comprises a portion of the N-terminal fragment of the first vesicle localization moiety and a portion of the C-terminal fragment of the second vesicle localization moiety, wherein the chimeric vesicle localization moiety is incorporated into extracellular vesicles and comprises an extracellular domain, a transmembrane domain and a cytosolic domain.

[0128] Alternatively, the vesicle localization moiety can be a multipass membrane protein and the isopeptide domain may be fused with one of the surface loops or domains of the multipass vesicle localization moiety. When the isopeptide domain may be fused to the vesicle localization moiety, linkers may be used at one or both sides of the isopeptide domain sequence.

[0129] In an embodiment, an EV may have or comprise a vesicle localization moiety of the invention. In a separate embodiment, an EV may have or comprise a combination of vesicle localization moieties of the invention. In a separate embodiment, an EV may have or comprise a combination of two or more vesicle localization moieties of the invention. In another embodiment, an EV may have or comprise a combination of three or more vesicle localization moieties of the invention. In another embodiment, an EV may have or comprise a combination of four or more vesicle localization moieties of the invention. In another embodiment, an EV may have or comprise a combination of five or more vesicle localization moieties of the invention. In an embodiment, an EV may have many copies of a vesicle localization moiety of the invention. In another embodiment, an EV may have many copies of two or more vesicle localization moiety of the invention.

[0130] EVs and/or exosomes, and/or molecule-vesicle localization moiety fusion protein can also be engineered to increase their serum half-life and reduce their immunogenicity. As used herein, a “vesicle localization moiety fusion protein” (also called “VLM fusion protein”) is a fusion protein comprising a vesicle localization moiety and a polypeptide (e.g., protein or peptide) that can participate and form an isopeptide bond. A “chimeric vesicle localization moiety fusion protein” (also called “chimeric VLM fusion protein”) is a fusion protein comprising a chimeric vesicle localization moiety and a polypeptide (e.g., protein or peptide) that can participate and form an isopeptide bond. The polypeptide that can participate and form an isopeptide bond may be an isopeptide domain or an isopeptide tag. As used herein, a “molecule tag” (may also be called “targeting moiety fusion protein” or “targeting moiety conjugate” or “molecule of interest fusion protein” or “molecule of interest conjugate” depending on context) is an isopeptide domain or isopeptide tag covalently coupled to a molecule of interest (i.e., desired molecule) wherein the molecule of interest may be a polypeptide (e.g., protein (such as, a targeting protein (e.g., scFv) or peptide or affinity peptide (such as, a GPC affinity peptide)), lipid, carbohydrate, nucleic acid, ligand, aptamer, small molecules, chemical compound or macromolecules. A targeting moiety fusion protein (or targeting moiety fusion peptide) or molecule of interest fusion protein (or molecule of interest fusion peptide) can be a single polypeptide derived from two separate polypeptides or portions of two separate polypeptides, wherein one of the two polypeptides or portion thereof is a targeting moiety of interest or a molecule of interest and the other polypeptide or portion thereof is an isopeptide domain or isopeptide tag. A targeting moiety conjugate or molecule of interest conjugate can be an isopeptide domain or isopeptide tag covalent linked to a lipid, carbohydrate, nucleic acid, nucleic acid analog, ligand, aptamer, small molecules, chemical compound or macromolecules. Such covalent linkage often requires chemical crosslinking or photocrosslinking in order to form conjugates.

[0131] In a preferred embodiment, the molecule tag may be a fusion of an isopeptide tag and a polypeptide (such as a scFv antibody or affinity peptide). As used herein, a “molecule-VLM fusion protein” is a fusion protein comprising a VLM fusion protein and a molecule tag, so as to permit an EV to display a targeting moiety(ies) (e.g., a desired peptide or protein) on its surface in which the desired molecule is coupled to the surface of the EV through an isopeptide bond covalently linking the molecule to a vesicle localization moiety. As such, the “molecule-vesicle localization moiety fusion protein” is a fusion protein comprising a fusion protein of a vesicle localization moiety and a polypeptide that can participate and form an isopeptide bond covalent linked via an isopeptide bond to a molecule tag comprising a molecule of interest (for example, a targeting peptide or polypeptide) fused to a polypeptide partner that can participate and form an isopeptide bond. For example, in a preferred embodiment, the vesicle localization moiety may be fused to an isopeptide domain while the molecule, a desired moiety such as, for example, a desired peptide or protein to target a cell or a specific cell type, may be fused to an isopeptide tag so that the isopeptide domain and isopeptide tag may participate in formation of an isopeptide bond thereby covalently linking the vesicle localization moiety and the molecule (of interest). In a separate embodiment, the vesicle localization moiety may be fused to an isopeptide tag while the molecule may be fused to an isopeptide domain. Further, the isopeptide domain may be fragmented to produce a catalytic domain and a peptide fragment; the latter (or its derivative) may still participate in isopeptide bond formation catalyzed by the split catalytic domain.

[0132] As such, in an embodiment, the vesicle localization moiety may be fused to an isopeptide tag (vesicle localization moiety fusion protein), the molecule (e.g., a peptide or protein of interest) may be fused to a second isopeptide tag (molecule tag), and an isopeptide bond between the vesicle localization moiety fusion protein and the molecule tag may be catalyzed by a split catalytic domain (a ligase) derived from fragmenting an isopeptide domain into a catalytic component and a second isopeptide tag. Further, the EV and/or exosome can be modified with a protracting moiety that can be made of 1, 2, 3, 4, 5 or more moieties of a synthetic polymer. The synthetic polymer can be biodegradable or non-biodegradable. Biodegradable polymers useful as protracting moieties include, but are not limited to, poly(2-methacryloyloxyethyl phosphorylcholine) (PMPC) and poly[oligo(ethylene glycol) methyl ether methacrylate] (POEGMA). Non-biodegradable polymers useful as protracting moieties include without limitation poly(ethylene glycol)(PEG), polyglycerol, poly(N-(2-hydroxypropyl)methacrylamide)(PHPMA), polyoxazolines and poly(N-vinylpyrrolidone)(PVP).

[0133] The synthetic polymer can include or be a PEG. Conjugation of one or more PEG moieties to a protein increases its half-life by increasing its MW, hydrodynamic radius/volume and overall size and thus reducing its renal clearance. PEGylation can increase the solubility, reduce the aggregation and immunogenicity, and avoid phagocytosis of the protein. PEG is flexible, uncharged and non-biodegradable, has relatively low immunogenicity, and has been approved by the US Food and Drug Administration as GRAS (generally recognized as safe). The one or more PEG moieties independently can be linear or branched. Furthermore, the one or more PEG moieties independently can terminate in a hydroxyl group, a methoxy group (mPEG) or another capped group.

[0134] In some embodiments, the individual mass (e.g., average molecular weight), or the total mass, of the one or more synthetic polymer moieties is about 10-50, 10-20, 20-30, 30-40 or 40-50 kDa, or about 10, 20, 30, 40 or 50 kDa. The individual mass (e.g., average MW), or the total mass, of the one or more synthetic polymer moieties can also be greater than about 50 kDa, such as about 50-100, 50-60, 60-70, 70-80, 80-90 or 90-100 kDa, or about 60, 70, 80, 90 or 100 kDa. Moreover, the mass (e.g., average MW) of an individual synthetic polymer moiety can be less than about 10 kDa, such as about 1-5 or 5-10 kDa, or about 5 kDa. In certain embodiments, the individual mass (e.g., average MW), or the total mass, of the one or more synthetic polymer (e.g., PEG) moieties is about 20 or 40 kDa. The half-life of the modified protein can be tuned based on the length of the synthetic polymer, with a longer polymer generally conferring a longer half-life.

[0135] EVs and/or exosomes, and/or molecule-vesicle localization moiety fusion protein can be engineered to include post translation modifications that reduce the immunogenicity of the EV and/or exosome, and/or the molecule-vesicle localization moiety fusion protein. Such post translational modifications can include, for example, glycosylation (e.g., N-linked glycosylation and O-linked glycosylation), lipidation, phosphorylation, sulfation, acetylation (e.g., acetylation of the N-terminus), amidation (e.g., amidation of the C-terminus), hydroxylation, methylation, formation of an intramolecular or intermolecular disulfide bond, formation of a lactam between two side chains, formation of pyroglutamate, and ubiquitination.

### Targeting Moieties of Interest

[0136] Any of the extracellular vesicles disclosed herein may include one or more targeting moieties of interest. They can be embedded in or displayed on vesicle membranes. The extracellular vesicle can be an exosome, and the targeting moiety can be displayed on the outer surface of the exosome. For example, the targeting moiety may be displayed/joined/attached to the surface domain of the chimeric localization moiety.

[0137] In a preferred example, the invention provides an extracellular vesicle of the invention comprising a fusion protein comprising (1) a chimeric vesicle localization moiety comprising a surface and transmembrane domain of a first vesicle localization moiety and a cytosolic domain of a second vesicle localization moiety and (2) one or more isopeptide domain(s) and/or isopeptide tag(s), wherein one or more targeting moiety fusion protein(s), peptide(s) or conjugate(s) comprising a complementary isopeptide tag or isopeptide domain and a targeting moiety is covalently attached via an isopeptide bond formed between an isopeptide domain and an isopeptide tag. In a preferred embodiment, the cytosolic domain of the second (2^{nd}) VLM replaces cytosolic domain of the first (1^{st}) VLM in the chimeric VLM. Further, herein, other chimeric vesicle localization moieties are contemplated having the arrangement of ABc, AbC, Abc, aBC, aBc and abC, where A, B and C correspond to the surface domain, transmembrane domain and cytosolic domain, respectively, of a first vesicle localization moiety and a, b, and c correspond to the surface domain, transmembrane domain and cytosolic domain, respectively, of a second vesicle localization moiety. In a preferred embodiment, the targeting moiety(ies) is/are similarly displayed on the external surface of these engineered EVs and/or exosomes.

[0138] Targeting moieties (such as tissue specific targeting moieties) can comprise a small molecule, glycoprotein, polypeptides, peptide, oligopeptide, protein, lipid, carbohydrate, nucleic acid, polysaccharides, ligand, aptamer, small molecules, chemical compound or macromolecules, therapeutic drugs, imaging moieties or other molecules that facilitates the targeting of the vesicle to a cell or tissue of interest. The term “polypeptide,” “peptide,” “oligopeptide,” and “protein,” are used interchangeably herein, and refer to a polymeric form of amino acids of any length, which can include coded and non-coded amino acids, chemically, or biochemically modified or derivatized amino acids, and polypeptides having modified peptide backbones. Targeting moieties can comprise a nucleic acid analog, such as, antisense oligonucleotide (ASO, 2′-O-methyl (OMe), 2′-fluoro (F), and 2′-O-methoxyethyl (MOE) RNA, locked nucleic acid (LNA), constrained ethyl (cEt), phosphorodiamidate morpholinos (PMOs), phosphorothioate, and peptide nucleic acid (PNA)).

[0139] In one embodiment of the invention, a targeting moiety may be an antibody, a ligand or a functional epitope thereof that binds to a cell or tissue marker, for example, a cell surface receptor.

[0140] As used herein, the term antibody can be a protein or polypeptide functionally defined as a binding protein and structurally defined as comprising an amino acid sequence that is recognized by one of skill in the art as being derived from a variable region of an immunoglobulin. An antibody can comprise one or more polypeptides substantially encoded by immunoglobulin genes, fragments of immunoglobulin genes, hybrid immunoglobulin genes (made by combining the genetic information from different animals), or synthetic immunoglobulin genes. The recognized, native, immunoglobulin genes can include the kappa, lambda, alpha, gamma, delta, epsilon and mu constant region genes, as well as myriad immunoglobulin variable region genes and multiple D-segments and J-segments. Light chains can be classified as either kappa or lambda. Heavy chains can be classified as gamma, mu, alpha, delta, or epsilon, which in turn define the immunoglobulin classes, IgG, IgM, IgA, IgD and IgE, respectively.

[0141] Antibodies may exist as intact immunoglobulins, as a number of well characterized fragments produced by digestion with various peptidases to produce, for example, antigen-binding fragments F(ab′)₂, Fab and Fab′, or as a variety of fragments made by recombinant DNA technology, such as variable fragment (Fv), single chain variable fragment (scFv), diabodies, tascFv, bis-scFv, nanobody (e.g., V_{H}H or V_{NAR} fragment), and miniaturized “3G” fragment (Nelson, A. L. (2010) Antibody fragments. MAbs 2: 77-83; and Muyldermans, S. (2103) Nanobodies: natural single-domain antibodies. Ann. Rev. Biochem. 82:775-797). Antibodies can derive from many different species (e.g., rabbit, sheep, camel, human, or rodent, such as mouse or rat), or can be synthetic. Antibodies can be chimeric, humanized, or human. Antibodies can be monoclonal or polyclonal, multiple or single chained, fragments or intact immunoglobulins. In a preferred embodiment, the antibody is a scFv. Examples of scFv as targeting moieties are provided in Table 6 under SEQ ID NO: 151-156 for both nucleic acid coding sequence as well as amino acid sequence.

[0142] In an embodiment of the invention, the targeting moiety is a peptide (e.g., an affinity peptide). Examples of affinity peptides are provided in Table 6 under SEQ ID NO: 157-196 for both nucleic acid coding sequence as well as amino acid sequence and additionally in FIGS. 12 and 13 and Examples 11 and 12.

[0143] In another embodiment, the targeting moiety may be an antibody fragment. In yet another embodiment, the antibody fragment may be any of F(ab′)₂, Fab, Fab′, Fv, scFv, diabodies, tascFv, bis-scFv, nanobody and miniaturized “3G” fragment. In a preferred embodiment, the antibody fragment is single chain Fv (scFv), wherein variable region of heavy chain (V_{H}) and variable region of light chain (V_{L}) are joined together by a flexible linker. The variable region of heavy chain fragment can precede the variable region of light chain fragment, or vice versa. The flexible linker is often glycine-serine rich, such as a (GGGGS)₄ linker. In one embodiment, the scFv binds a target on the surface of a cell or tissue. In a preferred embodiment, the scFv is attached to a chimeric vesicle localization moiety incorporated in an extracellular vesicle (such as an exosome) and displayed outside the extracellular vesicle (e.g., exosome). In a more preferred embodiment, the scFv is attached to a chimeric vesicle localization moiety and displayed outside an extracellular vesicle (e.g., exosome) preferentially or selectively targets a specific cell type or tissue. Merely by way of example, the antibody fragment may be monospecific or bispecific. In an embodiment of the invention, the antibody fragment may be multivalent.

[0144] Examples of suitable antibodies particularly single chain Fv antibodies; and fragments, include antibodies directed against any of Thy1, MHC class II, C3d-binding region of complement receptor type 2 (CR2), VCAM-1, E-selectin, alpha 8 integrin, integrin alpha-M (CD11b) and CD163. Exemplary antibodies from which Fab and/or scFv antibodies may be prepared include OX7 antibody against Thy1 protein (Suana, A. J. et al., J. Pharmacol. Exp. Ther. 2011; 337:411-422; RT1 antibody against MHC class II protein (Hultman, K. L. et al., ACS Nano. 2008; 2:477-484); monoclonal antibody to C3d binding region of CR2 (Serkova, N. J. et al., Radiology. 2010; 255:517-526); monoclonal antibody to VCAM-1 (clone M/K2, Cambridge Bioscience) (Akhtar, A. M., PLoS One. 2010; 5:e12800); monoclonal antibody, MES-1, directed to E-selectin (Asgeirsdottir, S. A. et al., Mol. Pharmacol. 2007; 72:121-131); anti-α8 integrin antibody (Santa Cruz Biotechnologies) (Scindia, Y. et al., Arthritis Rheum. 2008; 58:3884-3891); monoclonal antibody against CD11b (Shirai, T. et al., Drug Targeting. 2012; 20:535-543); and anti-CD163 monoclonal antibody (ED2; sc-58965, Santa Cruz Biotechnology) (Sawano, T. et al. 2015. Oncology reports. 33: 2151-60). Suitable examples of scFv as targeting moieties are provided in Table 6 under SEQ ID NO: 151-156 for both nucleic acid coding sequence as well as amino acid sequence and in FIGS. 19-21.

[0145] Any of the targeting moieties described herein can enhance the selectivity of the vesicles towards the target cell of interest as compared to one or more other tissues or cells. The one or more selective targeting moieties can be expressed on modified vesicles in a way that allows such modified vesicles to bind to intended targets. The one or more targeting moieties can expose sufficient amount of amino acids to allow such binding.

[0146] The modified vesicles provided herein can comprise one or more targeting moieties that selectively target the vesicles to cells or tissue of interest by binding or physically interacting with markers expressed on such cells.

[0147] The term “selective” or “selectively” as used herein in the context of selective targeting or selective binding or selective interaction can refer to a preferential targeting, binding or interaction to a cell, tissue, or organ of interest as compared to at least one other type of cell, tissue or organ.

[0148] A “functional fragment” of a protein can mean a fragment of the protein which retains a function of a full-length protein from which it is derived, e.g., a targeting or binding function identical or similar to that of the full-length protein. A “functional fragment” of an antibody can be its antigen binding portion or fragment, which confers binding specificity for the intact antibody. A function can be similar to a function of a full-length protein if it retains at least 75%, 80%, 85%, 90%, 95%, 99%, or 100% of that function of the full-length protein. The function can be measured e.g., using an assay, e.g., an in vivo binding assay, a binding assay in a cell, or an in vitro binding assay.

[0149] In general, “sequence identity” or “sequence homology”, refer to a nucleotide-to-nucleotide or amino acid-to-amino acid correspondence of two polynucleotides or polypeptide sequences, respectively. As used herein, “sequence identity” or “identity” refers, in the context of two nucleic acid sequences or amino acid sequences, to the residues in the two sequences that are the same when aligned for maximum correspondence over a specified comparison window.

[0150] As used herein, “percent sequence identity” means the value determined by comparing two optimally aligned sequences over a comparison window, wherein (the portion of the polynucleotide or polypeptide sequence in the comparison window may comprise additions or deletions (i.e., gaps) compared to the reference sequence which does not comprise additions or deletions comprises) can for optimal alignment of the two sequences. The percentage can be calculated by determining the number of positions at which the identical nucleotide or amino acid occurs in both sequences to yield the number of matched positions, dividing the number of matched positions by the total number of positions in the comparison window and multiplying the result by 100 to determine the percentage of sequence identity.

[0151] Sequence comparisons, such as for the purpose of assessing identities, may be performed by any suitable alignment algorithm, including but not limited to the Needleman-Wunsch algorithm (see, e.g., the EMBOSS Needle aligner available at www.ebi.ac.uk/Tools/psa/emboss_needle/, optionally with default settings; Needleman, S. B. and Wunsch, C. D. (1970) A general method applicable to the search for similarities in the amino acid sequence of two proteins. J. Mol. Biol. 48:443-53), the BLAST algorithm (see, e.g., the BLAST alignment tool available at blast.ncbi.nlm.nih.gov/Blast.cgi, optionally with default settings; Altschul, S. F. et al. (1990) Basic local alignment search tool. J. Mol. Biol. 215:403-410; and Altschul, S. F. et al. (1997) Gapped BLAST and PSI-BLAST: a new generation of protein database search programs. Nucleic Acids Res. 25:3389-3402), and the Smith-Waterman algorithm (see, e.g., the EMBOSS Water aligner available at www.ebi.ac.uk/Tools/psa/emboss water/, optionally with default settings; Smith, T. F. and Waterman, M. S. (1981) Identification of common molecular subsequences. J. Mol. Biol. 147:195-7). Optimal alignment may be assessed using any suitable parameters of a chosen algorithm, including default parameters.

[0152] The “percent identity” between two sequences may be calculated as the number of exact matches between two optimally aligned sequences divided by the length of the reference sequence and multiplied by 100. Percent identity may also be determined, for example, by comparing sequence information using the advanced BLAST computer program, including version 2.2.9, available from the National Institutes of Health. The BLAST program can be based on the alignment method of Karlin and Altschul, Proc. Natl. Acad. Sci. USA 87:2264-2268 (1990) and as discussed in Altschul, et al., J. Mol. Biol. 215:403-410 (1990); Karlin and Altschul, Proc. Natl. Acad. Sci. USA 90:5873-5877 (1993); and Altschul et al., Nucleic Acids Res. 25:3389-3402 (1997). Briefly, the BLAST program can define identity as the number of identical aligned symbols (i.e., nucleotides or amino acids), divided by the total number of symbols in the shorter of the two sequences. The program may be used to determine percent identity over the entire length of the sequences being compared. Default parameters can be provided to optimize searches with short query sequences, for example, with the BLASTP program. The program can also allow use of an SEG filter to mask-off segments of the query sequences as determined by the SEG program of Wootton, J. C. and Federhen, S. (1993) Computers Chem. 17:149-163. High sequence identity can include sequence identity in ranges of sequence identity of approximately 80% to 99% and integer values there between.

[0153] A “homolog” or “homologue” can refer to any sequence that has at least about 90%, 95%, 96%, 97%, 98%, 99%, or 99.5% sequence homology to another sequence. Preferably, a homolog or homologue refers to any sequence that has at least about 98%, 99%, or 99.5% sequence homology to another sequence. In some cases, the homolog can have a functional or structural equivalence with the native or naturally occurring sequence. In some cases, the homolog can have a functional or structural equivalence with a domain, a motif or a part of the protein, that is encoded by the native sequence or naturally occurring sequence.

[0154] Homology comparisons may be conducted with sequence comparison programs. Computer programs may calculate percent (%) homology between two or more sequences and may also calculate the sequence identity shared by two or more amino acid or nucleic acid sequences. Sequence homologies may be generated by any of a number of computer programs, for example BLAST or FASTA, etc. A suitable computer program for carrying out such an alignment is the GCG Wisconsin Bestfit package (University of Wisconsin, U.S.A; Devereux, J. et al. (1984) Nucleic Acids Res. 12:387). Examples of other software than may perform sequence comparisons include, but are not limited to, the BLAST package (see Ausubel, F. M. et al. (1999) Short Protocols in Molecular Biology, 4^{th} Ed.—Chapter 18), FASTA (Atschul, S. F. et al. (1990) J. Mol. Biol. 215:403-410) and the GENEWORKS suite of comparison tools.

[0155] Percent homology may be calculated over contiguous sequences, i.e., one sequence is aligned with the other sequence and each amino acid or nucleotide in one sequence is directly compared with the corresponding amino acid or nucleotide in the other sequence, one residue at a time. This is called an “ungapped” alignment. Typically, such ungapped alignments can be performed over a relatively short number of residues.

[0156] In an otherwise identical pair of sequences, one insertion or deletion may cause the following amino acid or nucleotide residues to be put out of alignment, thus potentially resulting in a large reduction in % homology when a global alignment is performed. Consequently, the sequence comparison method can be designed to produce optimal alignments that take into consideration possible insertions and deletions without unduly penalizing the overall homology or identity score. This can be achieved by inserting “gaps” in the sequence alignment to try to maximize local homology or identity.

[0157] BLAST 2 Sequences is another tool that can be used for comparing protein and nucleotide sequences (see FEMS Microbiol Lett. 1999 174(2): 247-50; FEMS Microbiol Lett. 1999 177(1): 187-8 and the website of the National Center for Biotechnology information at the website of the National Institutes for Health).

[0158] Homologous sequences can also have deletions, insertions or substitutions of amino acid residues which result in a functionally equivalent substance. Deliberate amino acid substitutions may be made on the basis of similarity in amino acid properties (such as polarity, charge, solubility, hydrophobicity, hydrophilicity, and/or the amphipathic nature of the residues) and it is therefore useful to group amino acids together in functional groups. Amino acids may be grouped together based on the properties of their side chains alone.

[0159] Substantially homologous sequences of the present invention include variants of the disclosed sequences, e.g., those resulting from site-directed mutagenesis, as well as synthetically generated sequences. In some cases, the variants may be allelic variants due to different alleles. In some cases, the variants may be derived from the same gene or allele due to alternative transcription start site or alternative splicing, resulting in variants which are isoforms.

[0160] An extracellular vesicle of the present disclosure can be one that comprises (e.g., on its surface) one or more targeting moiety(ies) to a marker (also referred to herein as a marker of interest). A marker of interest may be a cell surface marker of a target cell of interest to which an EV of the present invention is intended to target or bind. In some embodiments, an EV of the present disclosure is one that comprises (e.g., on its surface) targeting moiety(ies) to a marker of interest or a homologue(s) of a marker of interest. In some instance, an EV comprises at least 2, 3, 4, 5, 6, 7, 8, 9 or 10 different targeting moiety(ies). In an embodiment, an EV comprises a chimeric vesicle localization moiety attached to one or more targeting moiety(ies) to a marker of interest. The marker of interest may be a cell surface marker. In an embodiment, an EV comprises two or more chimeric vesicle localization moieties, wherein each chimeric vesicle localization moiety comprises a different targeting moiety(ies) targeted to the same marker of interest. In an embodiment, an EV comprises two or more chimeric vesicle localization moieties, wherein each chimeric vesicle localization moiety comprises a different targeting moiety(ies) targeted to the different markers of interest. In an embodiment, an EV comprises two or more chimeric vesicle localization moieties, wherein each chimeric vesicle localization moiety comprises a different targeting moiety(ies) targeted to the different markers of interest present on the same cell. In an embodiment, an EV comprises two or more chimeric vesicle localization moieties, wherein each chimeric vesicle localization moiety comprises a different targeting moiety(ies) targeted to the different markers of interest present on different cell types. In an embodiment, a vesicle comprises two or more chimeric vesicle localization moieties, wherein each chimeric vesicle localization moiety comprises a different targeting moiety(ies) targeted to the different markers of interest present in a tissue. In an embodiment, a vesicle comprises two or more chimeric vesicle localization moieties, wherein each chimeric vesicle localization moiety comprises a different targeting moiety(ies) targeted to the different markers of interest present in different tissues. In some instance, a vesicle comprises a sufficient number of targeting moiety(ies) to selectively target cells of interest over other cells. In some instance, a vesicle comprises a sufficient number of targeting moiety(ies) to selectively target a tissue of interest over other tissues.

[0161] In some cases, the vesicle comprises a concentration of a targeting moiety of interest that is 2, 3, 4, 5, 6, 8, 10, 12, 14, 17, 18, 20, 22, 25, 28, 30, 33, 35, 38, 40, 43, 44, 46, 48, 50, 52, 55, 57, 59, 62, 65, 68, 70, 72, 75, 78, 80, 82, 85, 89, 91, 92, 95, 100, 110, 120, 125, 130, 135, 145, 150, 155, 160, 170, 180, 185, 200, 210, 220, 230, 250, 270, 280, 290, 300, 310, 320, 330, 340, 350, 380, 400, 410, 430, 440, 450, 470, 490, 500, 510, 525, 540, 560, 580, 590, 600, 620, 650, 670, 680, 690, 700, 720, 740, 760, 780, 800, 820, 840, 860, 880, 890, 900, 920, 940, 960, 980 or 1000 times higher than the concentration of the targeting moiety on the surface of a naturally occurring vesicle. In some cases, the vesicle comprises a targeting moiety which is not naturally associated with a vesicle or an extracellular vesicle. In a preferred embodiment, the vesicle comprises a targeting moiety of interest fused to a chimeric vesicle localization moiety. In a separate preferred embodiment, the vesicle comprises two or more targeting moiety of interest fused to one or more chimeric vesicle localization moiety.

### Fusion Proteins

[0162] The “fusion protein” can be a single polypeptide derived from two separate polypeptides or portions of two separate polypeptides. As such, a chimeric vesicle localization may be considered a fusion protein. Similarly, a single polypeptide comprising (1) an isopeptide domain or an isopeptide tag and (2) a vesicle localization domain may also be considered a fusion protein. Other example of a fusion protein is a single polypeptide comprising (1) an isopeptide domain or an isopeptide tag and (2) a protein or peptide targeting moiety. Further fusion protein may be made from one or more isopeptide tag and/or isopeptide domain and a chimeric vesicle localization moiety. In an embodiment, two fusion proteins with complementary isopeptide tag and isopeptide domain may be covalently attached to each other through an isopeptide bond, such that, for example a targeting moiety fusion protein (to either an isopeptide tag or isopeptide domain) may be covalently linked to a vesicle localization moiety fusion protein or a chimeric vesicle localization moiety fusion protein (with a complementary isopeptide domain or isopeptide tag, respectively). In an embodiment of the invention a fusion protein (or peptide or conjugate) of the invention which comprises a isopeptide domain or isopeptide tag and a VLM or chimeric VLM may be paired or matched with any other fusion protein (or peptide or conjugate) described herein comprising a complementary isopeptide tag or domain and a targeting moiety, so long as the isopeptide domain binds to its complementary isopeptide tag and forms an isopeptide bond. For example, any fusion protein (or peptide or conjugates) comprising isopeptide domain having SEQ ID NO: 2, 4, 6, 8, 10, 12, 14, 16, 18, 20, 22, 24, 26, 28, 30, 32, 34, 36, 38, 40, 42, 44, 46, 48, 50, 52 or 54 and a VLM may be paired with any fusion protein (or peptide or conjugate) comprising its complementary isopeptide tag having e.g., SEQ ID NO: 62, so as to form an isopeptide bond covalently linking one fusion protein (or peptide or conjugate) to another fusion protein (or peptide or conjugate).

[0163] In an embodiment, the fusion protein comprising a chimeric vesicle localization moiety (or a vesicle localization moiety) additionally comprises a signal peptide. In an embodiment, the nascent or newly synthesized polypeptide of the chimeric vesicle localization moiety fusion protein comprises a signal peptide sequence at the N-terminus. Fusion protein of the chimeric vesicle localization (or a vesicle localization moiety) of interest comprises one or more isopeptide domain(s) or isopeptide tag(s). In an embodiment, the nascent polypeptide or newly synthesized polypeptide is a polypeptide being produced or initially produced by ribosome translation of an mRNA encoding the chimeric vesicle localization moiety fusion protein. In an embodiment, the nascent or newly synthesized polypeptide of the chimeric vesicle localization moiety fusion protein comprises from amino-to-carboxyl terminus in the order: signal peptide, one or more isopeptide domain(s) or isopeptide tag(s), surface domain, transmembrane domain and cytosolic domain. In an embodiment, the nascent or newly synthesized polypeptide of the chimeric vesicle localization moiety fusion protein may additionally comprise any one or more linkers, epitope tags and/or glycosylation sites. In an embodiment, the signal peptide sequence may be a naturally occurring sequence or an engineered (not naturally occurring) sequence. The naturally occurring sequence may be any of the signal peptide sequence associated with a naturally occurring vesicle localization moiety listed in Tables 2 and 3, in addition to other naturally occurring signal peptide sequences. In an embodiment, the engineered signal peptide sequence may be an artificial signal peptide sequence which directs strong protein secretion and expression in human cells. In an embodiment, the engineered signal peptide may be MWWRLWWLLLLLLLLWPMVWA (SEQ ID NO: 279). In a separate embodiment, the signal peptide sequence may be any of those listed in Table 12.

[0164] Examples of suitable linkers include, but are not limited to, any of (Gly)₈, (Gly)₆, (GS)ₙ (n=1-5), (GGS)ₙ (n=1-5), (GGGS)ₙ (n=1-5), (GGGGS)ₙ (n=1-5), (GGGGGS)ₙ (n=1-5) (EAAAK)ₙ (n=1-3), A(EAAAK)₄ALEA(EAAAK)₄A, (GGGGS)ₙ (n=1-4), (Ala-Pro)ₙ (10-34 aa), cleavable linkers such as VSQTSKLTRAETVFPDV, PLGLWA, RVLAEA; EDVVCCSMSY; GGIEGRGS, TRHRQPRGWE, AGNRVRRSVG, RRRRRRRRR, GLFG, and LE. Examples of suitable epitope tags include, but are not limited to, FLAG tags such as single or 3×FLAG tags, Myc tags, V5 tags, S-tags, HA tags, 6×His tag, or a combination thereof.

[0165] In a separate embodiment, the chimeric vesicle localization moiety lacks a signal peptide. In an embodiment, the chimeric vesicle localization moiety fusion protein is a mature or processed polypeptide. In an embodiment, the mature or processed polypeptide lacks the signal peptide sequence of the nascent polypeptide. In an embodiment, the mature or processed polypeptide comprises a glycosylation site. In an embodiment, the mature or processed polypeptide is a glycoprotein. In an embodiment, the glycoprotein comprises glycans. In an embodiment, the glycoprotein comprises N-linked glycan, O-linked glycan, phosphoglycan, C-linked glycan and/or GPI anchor. In an embodiment, the chimeric vesicle localization moiety is a mature or processed vesicle localizing polypeptide found in association or incorporated by an EV and lacks a signal peptide sequence present in the nascent polypeptide prior to maturation or processing. In an embodiment, it may be advantageous for the chimeric vesicle localization moiety (or vesicle localization moiety) fusion protein to additionally comprise a signal peptide sequence at its amino terminus when such fusion protein is expressed in cells and incorporated into exosomes; it may be desirable to also produce chimeric vesicle localization moiety fusion protein lacking signal peptide sequence when such fusion protein might be used to directly incorporate into an EV or exosome isolated from a cell.

[0166] The one or more targeting moieties of interest attached to an isopeptide tag or isopeptide domain as a fusion protein or a conjugate may be linked to a fusion protein comprising a vesicle localization domain or a chimeric vesicle localization domain and an isopeptide domain or isopeptide tag, respectively, wherein the isopeptide domain or isopeptide tag of the VLM or chimeric VLM is displayed on the surface of an EV or exosome. In an embodiment, the EV or exosome comprises on its outer surface one or more targeting moieties of interest linked through an isopeptide bond between an isopeptide tag and an isopeptide domain to a VLM or chimeric VLM incorporated within the lipid bilayer of the EV or exosome. In an embodiment, the one or more targeting moieties of interest can be a fusion protein, wherein the targeting moiety fusion protein comprises (1) a polypeptide or peptide that binds to a cell or tissue marker, cell or tissue surface receptor, cell or tissue ligand, a cell or tissue membrane protein or a molecule present on the outside facing surface or external to the cell surface and (2) an isopeptide domain or isopeptide tag. In an embodiment, the one or more targeting moieties of interest can be a targeting moiety conjugate, wherein the conjugate comprises (1) a molecule that targets a cell or tissue, and (2) an isopeptide domain or isopeptide tag. In an embodiment, an EV or exosome is an engineered or modified EV or exosome comprising a fusion protein comprising a VLM and an isopeptide domain or isopeptide tag. In a preferred embodiment, an EV or exosome is an engineered or modified EV or exosome comprising a fusion protein comprising a chimeric VLM and an isopeptide domain or isopeptide tag.

[0167] Examples of vesicle localization moieties from which chimeric vesicle localization moieties may be produced by domain swapping include any of the following: ACE, ADAM10, ADAM15, ADAM9, AGRN, ALCAM, ANPEP, ANTXR2, ATP1A1, ATP1B3, BSG, BTN2A1, CALM1, CANX, CD151, CD19, CD1A, CD1B, CD1C, CD2, CD200, CD200R1, CD226, CD247, CD274, CD276, CD33, CD34, CD36, CD37, CD3E, CD40, CD40LG, CD44, CD47, CD53, CD58, CD63, CD81, CD82, CD84, CD86, CD9, CHMP1A, CHMP1B, CHMP2A, CHMP3, CHMP4A, CHMP4B, CHMP5, CHMP6, CLSTN1, COL6A1, CR1, CSF1R, CXCR4, DDOST, DLL1, DLL4, DSG1, EMB, ENG, EVI2B, F11R, FASN, FCER1G, FCGR2C, FLOT1, FLOT2, FLT3, FN1, GAPDH, GLG1, GRIA2, GRIA3, GYPA, HSPG2, ICAM1, ICAM2, ICAM3, IGSF8, IL1RAP, IL3RA, IL5RA, IST1, ITGA2, ITGA2B, ITGA3, ITGA4, ITGA5, ITGA6, ITGAL, ITGAM, ITGAV, ITGAX, ITGB1, ITGB2, ITGB3, ITGB4, ITGB5, ITGB6, ITGB7, JAG1, JAG2, KIT, LAMP2, LGALS3BP, LILRA6, LILRB1, LILRB2, LILRB3, LILRB4, LMAN2, LRRC25, LY75, M6PR, MFGE8, MMP14, MPL, MRC1, MVB12B, NECTIN1, NOMO1, NOTCH1, NOTCH2, NOTCH3, NOTCH4, NPTN, NRP1, PDCD1, PDCD1LG2, PDCD6IP, PDGFRB, PECAM1, PLXNB2, PLXND1, PROM1, PTGES2, PTGFRN, PTPRA, PTPRC, PTPRJ, PTPRO, RPN1, SDC1, SDC2, SDC3, SDC4, SDCBP, SDCBP2, SELPLG, SIGLEC7, SIGLEC9, SIRPA, SLIT2, SNF8, SPN, STX3, TACSTD2, TFRC, TLR2, TMED10, TNFRSF8, TRAC, TSG101, TSPAN14, TSPAN7, TSPAN8, TYROBP, VPS25, VPS28, VPS36, VPS37A, VPS37B, VPS37C, VPS37D, VPS4A, VPS4B, VTI1A or VTI1B or an isoform thereof, or a homologue thereof, or a variant, or a functional fragment thereof, or an exosomal polypeptide. In a preferred embodiment, the chimeric vesicle localization moieties may be produced by domain swapping include any of the following: ADAM10, ALCAM, CLSTN1, IGSF8, IL3RA, ITGA3, ITGB1, LAMP2, LILRB4, PTGFRN, or SELPLG or an isoform thereof, or a homologue thereof, or a functional fragment thereof. Domain swapping is most easily achieved through recombinant DNA methods using coding sequence provided or referred to in Tables 2 and 3 to precisely dissect and fuse two different coding sequences inframe with each other to obtain a single nucleic acid encoding a chimeric vesicle localization moiety. Nucleic acid sequences encoding exemplary chimeric vesicle localization moieties may be obtained in Table 4 (for example, see SEQ ID NO: 115, 117, 119, 121, 123 and 125).

[0168] In an embodiment, a chimeric vesicle localization moiety may be produced by domain swapping two non-homologous vesicle localization moieties. In an embodiment, a chimeric vesicle localization moiety may be produced by domain swapping two vesicle localization moieties which are not orthologs. In an embodiment, a chimeric vesicle localization moiety may be produced by domain swapping two vesicle localization moieties which are not paralogs. In an embodiment, a chimeric vesicle localization moiety may be produced by domain swapping two vesicle localization moieties which are paralogs. In an embodiment, a chimeric vesicle localization moiety may be produced by domain swapping two vesicle localization moieties which are not allelic variants. In an embodiment, a chimeric vesicle localization moiety may be produced by domain swapping two vesicle localization moieties which are not isoforms. In an embodiment, a chimeric vesicle localization moiety may be produced by domain swapping two vesicle localization moieties which are not related by an ancestral gene or gene duplication. In an embodiment, a chimeric vesicle localization moiety may be produced by domain swapping two vesicle localization moieties which are related by gene duplication and have evolved to be paralogs encoded by homologous genes at a different genetic locus (not allelic). In an embodiment, a chimeric vesicle localization moiety may be produced by domain swapping two vesicle localization moieties which are distinct and non-homologous proteins. In an embodiment, a chimeric vesicle localization moiety may be produced by domain swapping two vesicle localization moieties, wherein the domains being swapped share less than about 95%, 90%, 70%, 50% or preferably less than about 30% amino acid sequence identity with gaps allowed in the sequence alignment to maximize sequence identity. In an embodiment, a chimeric vesicle localization moiety may be produced by domain swapping two vesicle localization moieties, wherein the domains being swapped differ in the length of the primary amino acid sequence by more than about 1.3-fold, 1.5-fold, 1.7-fold, 1.9-fold, 2.3-fold, 2.7-fold or more preferably about 3-fold compared to the shorter domain. The domains of a vesicle localization moiety may be determined in relation to membrane of a vesicle and may be described as surface domain (outside of the vesicle; also referred to sometimes as extracellular domain, which is topologically equivalent), transmembrane domain (spanning the lipid bilayer of the vesicle) and lumenal domain (in the interior of the vesicle; also referred to as a cytosolic domain prior to formation of a vesicle, which is topologically equivalent). In an embodiment, the three domains present in a vesicle localization moiety may be swapped with one or more domains from one or more other vesicle localization moiety. In a preferred embodiment, the cytosolic domain or lumenal domain of a vesicle localization moiety is swapped with a cytosolic domain or lumenal domain of a second vesicle localization moiety so as to produce a chimeric vesicle localization moiety with a surface-and-transmembrane domain of a 1st vesicle localization moiety and a cytosolic domain of a 2nd vesicle localization moiety.

[0169] Methods for making such fusion proteins and for localizing fusion proteins to exosomes can be as described, e.g., in Limoni S K, et al. Appl Biochem Biotechnol. 2018 Jun. 28. doi: 10.1007/s12010-018-2813-4.

### Nucleic Acids

[0170] The production of engineered vesicles can involve generation of nucleic acids that encode, at least, in part, one or more of the cell-type specific or selective targeting moieties described herein, one or more of the targeting moiety(ies) described herein, one or more of the vesicle localization moieties including chimeric vesicle localization moieties described herein, one or more fusion proteins described herein, or a combination thereof.

[0171] The disclosure includes vectors. Methods which are well known to those skilled in the art can be used to construct expression vectors containing coding sequences and appropriate transcriptional/translational control signals. Generally, expression vectors include transcriptional and translational regulatory nucleic acid operably linked to the nucleic acid encoding the protein. The term “control sequences” refers to DNA sequences necessary for the expression of an operably linked coding sequence in a particular expression system, e.g. mammalian cell, bacterial cell, cell-free synthesis, etc. The control sequences that are suitable for prokaryote systems, for example, include a promoter, optionally an operator sequence, and a ribosome binding site. Eukaryotic cell systems may utilize promoters, polyadenylation signals, and enhancers.

[0172] These methods include, for example, in vitro recombinant DNA techniques, synthetic techniques and in vivo recombination/genetic recombination. Alternatively, RNA capable of encoding the polypeptides of interest may be chemically synthesized. One of skill in the art can readily utilize well-known codon usage tables and synthetic methods to provide a suitable coding sequence for any of the polypeptides of the invention.

[0173] In some embodiments, a vector comprises nucleic acids encoding one or more cell-type specific or selective targeting moieties operably linked to nucleic acids that encode one or more isopeptide tags or isopeptide domains. In some embodiments, a vector comprises nucleic acids encoding one or more vesicle localization moieties, preferably chimeric vesicle localization moieties operably linked to nucleic acids that encode one or more isopeptide tags or isopeptide domains. A nucleic acid is “operably linked” when it is placed into a functional relationship with another nucleic acid sequence. For example, a promoter or enhancer is operably linked to a coding sequence if it affects the transcription of the sequence; or a ribosome binding site is operably linked to a coding sequence if it is positioned so as to facilitate the initiation of translation. Generally, “operably linked” means that the DNA sequences being linked are contiguous, and, in the case of a secretory leader, contiguous and in reading phase. Linking is accomplished by ligation or through amplification reactions. Synthetic oligonucleotide adaptors or linkers may be used for linking sequences in accordance with conventional practice.

[0174] In some embodiments, a vector comprises nucleic acids encoding the amino acid sequences or portion thereof set forth in Table 2 or Table 3, the latter through the accession number which provides the amino acid sequence for the VLMs so listed. In an embodiment, a vector comprises nucleic acids encoding the chimeric vesicle localization moiety produced from the vesicle localization moieties disclosed herein or in Table 4 (for example, see SEQ ID NO: 115, 117, 119, 121, 123 and 125). In one example, a vector comprises nucleic acids encoding an IGSF8 vesicle localization moiety operably linked to nucleic acids encoding any one or more of an isopeptide domain or an isopeptide tag, as disclosed herein. In one example, a vector comprises nucleic acids encoding a chimeric vesicle localization moiety operably linked to nucleic acids encoding any one or more of an isopeptide domain or isopeptide tag. In one example, a vector comprises nucleic acids encoding an isopeptide domain or isopeptide tag operably linked to nucleic acids encoding any one or more of a targeting moiety(ies) of interest or cell-type specific or selective targeting moieties. In an embodiment, a cell-type specific or selective targeting moiety is a peptide. In an embodiment, a cell-type specific or selective targeting moiety is an antibody or an antibody fragment. In an embodiment, a cell-type specific or selective targeting moiety is an F(ab′)₂, Fab or Fab′. In a preferred embodiment, a cell-type specific or selective targeting moiety is a scFv.

[0175] The nucleic acids may be natural, synthetic or a combination thereof. The nucleic acids may be RNA, mRNA, DNA or cDNA. Nucleic acid encoding the protein may be produced using known synthetic techniques, incorporated into a suitable expression vector using well established methods to form a protein-encoding expression vector which is introduced into a cell for protein expression using known techniques, such as transfection, lipofection, transduction and electroporation. The nucleic acids may be isolated and obtained in substantial purity. Usually, the nucleic acids, either as DNA or RNA, will be obtained substantially free of other naturally-occurring nucleic acid sequences, generally being at least about 50%, usually at least about 90% pure and are typically “recombinant,” e.g., flanked by one or more nucleotides with which it is not normally associated on a naturally occurring chromosome.

[0176] Expression of the nucleic acids can be regulated by their own or by other regulatory sequences known in the art. The nucleic acids of the invention can be introduced into suitable host cells using a variety of techniques available in the art. The expressed protein may localize or form an exosome or extracellular vesicle and released from the producing cell. Such exosomes or extracellular vesicles may be harvested from the culture medium. Similarly, the selected protein may be produced using recombinant techniques, or may be otherwise obtained, and then may be introduced directly into isolated exosomes by electroporation or transfection e.g. electroporation, transfection using cationic lipid-based transfection reagents, and the like.

[0177] The nucleic acids can also include expression vectors, such as plasmids, or viral vectors, or linear vectors, or vectors that integrate into chromosomal DNA. Expression vectors can contain a nucleic acid sequence that enables the vector to replicate in one or more selected host cells. Such sequences are well known for a variety of cells. The origin of replication from the plasmid pBR322 is suitable for most Gram-negative bacteria. In eukaryotic host cells, e.g., mammalian cells, the expression vector can be integrated into the host cell chromosome and then replicate with the host chromosome or the expression vector may be an episome and replicate autonomously independent of the host chromosome.

[0178] Expression vectors also can contain a selection gene, also termed a selectable marker. The selection gene can encode a protein necessary for the survival or growth of transformed host cells grown in a selective culture medium. Host cells not transformed with the vector containing the selection gene will not survive in the selective culture medium. Selection genes can encode proteins that (a) confer resistance to antibiotics or other toxins, e.g., ampicillin, neomycin, G418, puromycin, hygromycin, methotrexate, or tetracycline, (b) complement auxotrophic deficiencies, or (c) supply critical nutrients not available from complex media, e.g., the gene encoding D-alanine racemase for Bacilli. An exemplary selection scheme can utilize a drug to arrest growth of a host cell. Those cells that are successfully transformed with a heterologous gene can produce a protein conferring drug resistance and thus survive the selection regimen. Other selectable markers for use in bacterial or eukaryotic (including mammalian) systems are well-known in the art.

[0179] An example of a promoter that is capable of expressing a transgene in a mammalian nervous system cell is the EF1a promoter. Another example of a promoter is the immediate early cytomegalovirus (CMV) promoter sequence. Other constitutive promoter sequences may also be used, including, but not limited to the simian virus 40 (SV40) early promoter, mouse mammary tumor virus promoter (MMTV), human immunodeficiency virus (HIV) long terminal repeat (LTR) promoter, MoMuLV promoter, phosphoglycerate kinase (PGK) promoter, MND promoter (a synthetic promoter that contains the U3 region of a modified MoMuLV LTR with myeloproliferative sarcoma virus enhancer, an avian leukemia virus promoter, an Epstein-Barr virus immediate early promoter, a Rous sarcoma virus promoter, as well as human gene promoters such as, but not limited to, the actin promoter, the myosin promoter, the elongation factor-1a promoter, the hemoglobin promoter, and the creatine kinase promoter. The promoter can be a non-constitutive promoter.

[0180] Inducible or repressible promoters are also contemplated for use in this disclosure. Examples of inducible promoters include a metallothionein promoter, a glucocorticoid promoter, a progesterone promoter, a tetracycline promoter, a c-fos promoter, the T-REx system of ThermoFisher which places expression from the human cytomegalovirus immediate-early promoter under the control of tetracycline operator(s), and RheoSwitch promoters of Intrexon.

[0181] Expression vectors typically have promoter elements, e.g., enhancers, to regulate the frequency of transcriptional initiation. These can be located in the region 30-110 bp upstream of the start site, although a number of promoters have been shown to contain functional elements downstream of the start site as well. The spacing between promoter elements can frequently be flexible, so that promoter function can be preserved when elements are inverted or moved relative to one another. The expression vector may be a mono-cistronic construct, a bi-cistronic construct or multiple cistronic construct. For a bi-cistronic construct, the two cistrons can be oriented in opposite directions with the control regions for the cistrons located in between the two cistrons. When the construct has more than two cistrons, the cistrons can be arranged in two groups with the two groups oriented in opposite directions for transcription.

[0182] It can be desirable to modify the polypeptides described herein. There can be many ways of generating alterations in a given nucleic acid construct to generate variant polypeptides. Such methods can include site-directed mutagenesis, PCR amplification using degenerate oligonucleotides, exposure of cells containing the nucleic acid to mutagenic agents or radiation, chemical synthesis of a desired oligonucleotide (e.g., in conjunction with ligation and/or cloning to generate large nucleic acids) and other techniques (see, e.g., Gillam and Smith, Gene 8:81-97, 1979; Roberts et al., Nature 328:731-734, 1987, which is incorporated by reference in its entirety for all purposes). The recombinant nucleic acids encoding the polypeptides described herein can be modified to provide preferred codons which can enhance translation of the nucleic acid in a selected organism or cell line.

[0183] The polynucleotides can also include nucleotide sequences that are substantially equivalent (homologues) to other polynucleotides described herein. Polynucleotides can have at least about 80%, more typically at least about 90%, and even more typically at least about 95%, sequence identity to another polynucleotide. In an embodiment, a polynucleotide encoding a protein may be considered equivalent to a second polynucleotide encoding the same protein due to degeneracy of the genetic codon. Such polynucleotides are anticipated herein.

[0184] The nucleic acids can also provide the complement of the polynucleotides including a nucleotide sequence that has at least about 80%, more typically at least about 90%, and even more typically at least about 95%, sequence identity to a polynucleotide encoding a polypeptide recited herein. The polynucleotide can be DNA (genomic, cDNA, amplified, or synthetic) or RNA. Nucleic acids which encode protein analogs or variants (i.e., wherein one or more amino acids are designed to differ from the wild type polypeptide) may be produced using site directed mutagenesis or PCR amplification in which the primer(s) have the desired point mutations. For a detailed description of suitable mutagenesis techniques, see Sambrook et al., Molecular Cloning: A Laboratory Manual, Cold Spring Harbor Laboratory Press, Cold Spring Harbor, N.Y. (1989) and/or Current Protocols in Molecular Biology, Ausubel et al., eds, Green Publishers Inc. and Wiley and Sons, N.Y (1994), each of which is incorporated by reference in its entirety for all purposes. Chemical synthesis using methods well known in the art, such as that described by Engels et al., Angew Cher Intl Ed. 28:716-34, 1989 (which is incorporated by reference in its entirety for all purposes), may also be used to prepare such nucleic acids.

[0185] Amino acid “substitutions” for creating variants can result from replacing one amino acid with another amino acid having similar structural and/or chemical properties, i.e., conservative amino acid replacements. Amino acid substitutions may be made on the basis of similarity in polarity, charge, solubility, hydrophobicity, hydrophilicity, and/or the amphipathic nature of the residues involved. For example, nonpolar (hydrophobic) amino acids include alanine, leucine, isoleucine, valine, proline, phenylalanine, tryptophan, and methionine; polar neutral amino acids include glycine, serine, threonine, cysteine, tyrosine, asparagine, and glutamine; positively charged (basic) amino acids include arginine, lysine, and histidine; and negatively charged (acidic) amino acids include aspartic acid and glutamic acid.

[0186] When the nucleic acid is introduced into a cell ex vivo, the nucleic acid may be combined with a substance that promotes transference of a nucleic acid into a cell, for example, a reagent for introducing a nucleic acid such as a liposome or a cationic lipid, in addition to any additional excipients. Electroporation applying voltages in the range of about 20-1000 V/cm may be used to introduce nucleic acid or protein into exosomes. Transfection using cationic lipid-based transfection reagents such as, but not limited to, Lipofectamine® MessengerMAX™ Transfection Reagent, Lipofectamine® RNAiMAX Transfection Reagent, Lipofectamine® 3000 Transfection Reagent, or Lipofectamine® LTX Reagent with PLUS™ Reagent, may also be used. The amount of transfection reagent used may vary with the reagent, the sample and the cargo to be introduced. Alternatively, a vector carrying the nucleic acid of the present invention can also be used. Particularly, a composition in a form suitable for administration to a living body which contains the nucleic acid of the present invention carried by a suitable vector can be suitable for in vivo gene therapy.

[0187] The nucleic acid constructs can include linker peptides. The linker peptides can adopt a helical, β-strand, coil-bend or turn conformations. The linker motifs can be flexible linkers, rigid linkers or cleavable linkers. The linker peptides can be used for increasing the stability or folding of the peptide, avoid steric clash, increase expression, improve biological activity, enable targeting to specific sites in vivo, or alter the pharmacokinetics of the resulting fusion peptide by increasing the binding affinity of the targeting domain for its receptor. Folding, as used herein, refers to the process of forming the three-dimensional structure of polypeptides and proteins, where interactions between amino acid residues act to stabilize the structure. Non-covalent interactions are important in determining structure, and the effect of membrane contacts with the protein may be important for the correct structure. For naturally occurring proteins and polypeptides or derivatives and variants thereof, the result of proper folding is typically the arrangement that results in optimal biological activity, and can conveniently be monitored by assays for activity, e.g. ligand binding, enzymatic activity, etc.

[0188] The linker peptides can generally be composed of small non-polar (Gly) or non-polar (Ser) amino acids. The linker peptides can have sequences consisting primarily of stretches of glycine and/or serine residues. But can contain additional amino acids, such as Thr and Ala to maintain flexibility, as well as polar amino acids, such as Lys and Glu to improve solubility. In other cases, rigid linkers can have a Proline-rich sequence, such as (XP)ₙ, with X designating any amino acid, preferably Ala, Lys or Glu. In other cases, cleavable linkers can be used susceptible to reductive or enzymatic cleavage, such as disulfide or protease sensitive sequences, respectively. In some cases, the linker peptides can be linked to a reporter moiety, such as a fluorescent protein. Examples of linker sequences include but are not limited to, any of (Gly)₈, (Gly)₆, (GS)ₙ (n=1-5), (GGS)ₙ (n=1-5), (GGGS)ₙ (n=1-5), (GGGGS)ₙ (n=1-5), (GGGGGS)ₙ (n=1-5) (EAAAK)ₙ (n=1-3), A(EAAAK)₄ALEA(EAAAK)₄A, (GGGGS)ₙ (n=1-4), (Ala-Pro)ₙ (10-34 aa), cleavable linkers such as VSQTSKLTRAETVFPDV, PLGLWA, RVLAEA; EDVVCCSMSY; GGIEGRGS, TRHRQPRGWE, AGNRVRRSVG, RRRRRRRRR, GLFG, and LE.

[0189] The nucleic acid sequence can also contain signal sequences that encode for signal peptides that function as recognition sequences for sorting of the resulting fusion protein to the vesicular surface. The signal sequence can comprise a tyrosine-based sorting signal and can contain the NPXY where N stands for asparagine, P stands for proline, Y stands for tyrosine and X stands for any amino acid (alanine, cysteine, aspartic acid, glutamic acid, phenylalanine, glycine, histidine, isoleucine, lysine, leucine, methionine, asparagine, proline, glutamine, arginine, serine, threonine, valine, tryptophan or tyrosine). In some cases, the signal sorting motif can comprise a YXXO consensus motif, where O stands for an amino acid residue with a bulky hydrophobic side chain. In some cases, the sorting signal can comprise a (DE)XXXL(LI) consensus motif where D stands for aspartic acid, E stands for glutamic acid, X stands for any amino acid, L stands for leucine and I stands for isoleucine. In some cases, the signal sequence can comprise a di-leucine-based signal sequence motif such as (DE)XXXL(LI) or DXXLL consensus motifs, where D stands for aspartic acid, E stands for glutamic acid, X stands for any amino acid, L stands for leucine and I stands for isoleucine. In some cases, the signal peptic can comprise an acidic cluster. In some cases, the signal peptide can comprise a FW-rich consensus motif, where F stands for phenylalanine and W stands for tryptophan. In some cases, the signal peptide can comprise a proline-rich domain. In some cases, the sorting signal comprises the consensus motif NPFX (1,2) D, where N stands for asparagine, P stands for proline, F stands for phenylalanine, D stands for aspartic acid and X stands for any amino acids. In some cases, the encoded signal peptides can be recognized by adaptor protein complexes AP-1, AP-2, AP-3 and AP-4. In some cases, the DXXLL signals are recognized by another family of adaptors known as GGAs. In some cases, the signal peptides can be ubiquitinated. In an embodiment of the invention, the signal peptide is an immunoglobulin κ-chain signal peptide sequence, METDTLLLWVLLLWVPGSTGD (SEQ ID NO: 281). In another embodiment, the signal peptide is a human signal sequence. In a preferred embodiment, the signal peptide is a computationally designed signal peptide. In a preferred embodiment, the signal peptide sequence is MWWRLWWLLLLLLLLWPMVWA (SEQ ID NO: 279). Other signal peptides along with coding sequences are provided in Table 12.

### Production of Extracellular Vesicles

[0190] Any of the nucleic acids herein can be used for heterologous expression in a cell of a fusion protein comprising one or more chimeric vesicle localization moiety (or a VLM) and one or more isopeptide domains or isopeptide tags, wherein the fusion protein localizes or is an integral part of an extracellular vesicle produced by the cell. In an embodiment, any of the nucleic acids herein can be used for heterologous expression in a cell of a fusion protein comprising one or more a targeting moieties of interest and one or more isopeptide domains or isopeptide tags. Alternatively, a targeting moiety conjugate may be prepared wherein the targeting moiety conjugate comprises a targeting moiety of interest and an isopeptide domain or isopeptide tag. In an embodiment, such targeting moiety conjugates are prepared by chemical coupling or crosslinking. In an embodiment, such targeting moiety conjugates are prepared by chemical synthesis or a combination of chemical synthesis and recombinant DNA methods. In an embodiment, EVs and/or exosomes comprising a VLM or chimeric VLM fusion protein comprising (1) a VLM or chimeric VLM and (2) an isopeptide domain or isopeptide tag is covalently linked to a targeting moiety fusion protein comprising (1) a targeting moiety and (2) an isopeptide domain or isopeptide tag. In an embodiment, a cell or tissue-targeting EV or exosome comprises a VLM or chimeric VLM fusion protein comprising (1) a VLM or chimeric VLM and (2) an isopeptide domain or isopeptide tag; a targeting moiety fusion protein comprising (1) a targeting moiety and (2) an isopeptide domain or isopeptide tag; and an isopeptide bond between an isopeptide domain and an isopeptide tag between the VLM or chimeric VLM fusion protein and the targeting moiety fusion protein. In an embodiment, EVs and/or exosomes comprising a VLM or chimeric VLM fusion protein comprising (1) a VLM or chimeric VLM and (2) an isopeptide domain or isopeptide tag is covalently linked to a targeting moiety conjugate comprising (1) a targeting moiety and (2) an isopeptide domain or isopeptide tag. In an embodiment, a cell or tissue-targeting EV or exosome comprises a VLM or chimeric VLM fusion protein comprising (1) a VLM or chimeric VLM and (2) an isopeptide domain or isopeptide tag; a targeting moiety conjugate comprising (1) a targeting moiety and (2) an isopeptide domain or isopeptide tag; and an isopeptide bond between an isopeptide domain and an isopeptide tag between the VLM or chimeric VLM fusion protein and the targeting moiety conjugate.

[0191] Common GMP-grade cells used in such heterologous expression and from which vesicles may be isolated, including extracellular vesicles and exosomes, include HEK293 (human embryonic kidney cell line), variants of HEK293, such as HEK293T, HEK 293-F, HEK 293T, and HEK 293-H, dendritic cells, mesenchymal stem cell (MSCs), HT-1080, PER.C6, HeLa, C127, BHK, Sp2/0, NS0, Epi293, Expi293F, and any variants thereof, and any of the following types of allogeneic stem cell lines: Hematopoietic Stem Cells, such as bone marrow HSC, Mesenchymal Stem Cells, such as bone marrow MSC or placenta MSC, human Embryonic Stem Cells or its more differentiated progeny, such as hESC-derived dendritic cell or hESC-derived oligodendrocyte progenitor cell, Neural Stem Cells (NSCs), endothelial progenitor cells (EPCs), or induced Pluripotent Stem Cells (iPSCs).

[0192] In an embodiment, any of the cells used for heterologous expression may serve as a source for vesicles, especially extracellular vesicles comprising one or more chimeric vesicle localization moiety(ies)(or VLM) operably linked to one or more isopeptide domains or isopeptide tags. In a preferred embodiment, any of the cell used for heterologous expression may serve as a source for vesicles, especially extracellular vesicles comprising one or more chimeric vesicle localization moieties (or VLM) covalently linked to one or more isopeptide domains or isopeptide tags or a fusion protein comprising one or more chimeric vesicle localization moieties and to one or more isopeptide domains or isopeptide tags.

[0193] Any of the polypeptides herein can be produced by a cell (or cell line) generating vesicles which contain the polypeptide. Alternatively, the targeting moiety can be heterologously expressed by the cell producing the vesicle. In an embodiment, the cell producing the vesicle expresses a chimeric vesicle localization moiety (or a VLM) fusion protein and targeting moiety fusion protein, wherein the chimeric VLM (or VLM) fusion protein comprises a chimeric VLM (or VLM) and an isopeptide domain or isopeptide tag, wherein the targeting moiety fusion protein comprises a targeting moiety of interest and an isopeptide domain or isopeptide tag, and wherein the targeting moiety fusion protein associates with the chimeric vesicle localization moiety (or VLM) fusion protein on the surface of an EV or exosome by an isopeptide bond between the isopeptide domain and the isopeptide tag.

[0194] In a preferred embodiment, the cell producing the vesicle also expresses a fusion protein comprising a chimeric vesicle localization moiety and an isopeptide domain or isopeptide tag (i.e., a chimeric VLM fusion protein), which are covalently linked in a single polypeptide incorporated into a vesicle, preferably an extracellular vesicle or exosome, produced by the cell. In an embodiment, an extracellular vesicle or exosome producing cell may be considered a producer cell (for an EV or exosome). In an embodiment, more than one targeting moieties may be attached to a single chimeric vesicle localization moiety though one or more isopeptide bonds. In a separate embodiment, a chimeric vesicle localization moiety (or VLM) fusion protein covalently linked to one or more targeting moiety fusion proteins may be present at or are associated with a vesicle, wherein the chimeric vesicle localization moiety (or VLM) fusion protein comprises a chimeric VLM (or VLM) and one or more isopeptide domain(s) and/or isopeptide tag(s), wherein the chimeric VLM (or VLM) fusion protein is covalently linked to one or more targeting moiety fusion proteins through an isopeptide bond formed between an isopeptide domain and an isopeptide tag, and wherein the targeting moiety fusion protein comprise a targeting moiety and an isopeptide domain or isopeptide tag. In a separate embodiment, more than one type of chimeric vesicle localization moiety covalently linked to one or more targeting moieties may be present at or are associated with a vesicle, wherein each type of chimeric vesicle localization moiety differs by at least one amino acid. In an embodiment, the targeting moiety fusion protein is coupled to the vesicle by the producing cell, during vesicle biogenesis or prior to vesicle secretion or isolation through an isopeptide bond. In a different embodiment, the targeting moiety is coupled to the vesicle through an isopeptide bond after the vesicles are produced and/or isolated.

[0195] Modified extracellular vesicles can be obtained from a subject, from primary cell culture cells obtained from a subject, from cell lines (e.g., immortalized cell lines), and other cell sources. One can make modified extracellular vesicles with specific markers in several ways. One such method includes engineering cells directly in culture to express VLM or chimeric VLM fusion proteins that are then incorporated into the modified extracellular vesicles harvested as delivery vehicles from these engineered cells. Cells which are used for modified extracellular vesicle production are not necessarily related to or derived from the cell targets of interest. Once derived, vesicles may be isolated based on their size, biochemical parameters, or a combination thereof. Another method that can be used in conjunction with or independent of the direct cell engineering is physical isolation of particular subpopulations (subtypes) of modified vesicles with desired targeting moieties or desired characteristics from the broad, general set of all vesicles produced by a subject. Another method that can be used in conjunction with the previously described two methods or independently is direct incorporation of desired VLM or chimeric VLM fusion proteins on the vesicles surface. In this method, a general population of extracellular vesicles or a specific population of extracellular vesicles are isolated from cell culture. The isolated EVs may be then treated to incorporate desired VLM or chimeric VLM fusion protein into the vesicles (e.g., liposomal fusion) to generate modified vesicles. It is noted that these methods can be combined in different ways. Finally, the modified or engineered EVs or exosomes may be used to attach targeting moiety fusion proteins or conjugates of interest through the interaction between complementary isopeptide domain and isopeptide tag resulting in an isopeptide bond (i.e., a covalent bond) between the targeting moiety fusion protein or conjugate and VLM or chimeric VLM fusion protein. In this manner, desired EVs and/or exosomes targeting different markers, macromolecules, cell types or tissue types may be readily produced from a stock of engineered or modified EVs and/or exosomes and a collection of targeting moiety conjugates or fusion proteins, wherein the collection comprises targeting moiety conjugates or fusion proteins that differ in their ability to target specific markers, macromolecules, cell types or tissue types.

[0196] For example, the process can be direct engineering of cells for modified vesicles production followed by isolating modified vesicles, as described in Examples 2 and 8.

[0197] The modified vesicles can be incorporated with the targeting moieties directly with or without cholesterol or other phospholipids. The modified vesicle protein mixture can be created via gentle mixing and incubation or several cycles of freezing and thawing.

[0198] The modified vesicles can be derived from eukaryotic cells that can be obtained from a subject (autologous) or from allogeneic cell lines. The subject may be any living organism. Examples of subjects include humans, dogs, cats, mice, rats, and transgenic species thereof. Vesicles can be concentrated and separated from the circulatory cells using centrifugation, filtration, or affinity chromatography columns.

### EV Payloads

[0199] EVs, including exosomes, engineered to include vesicle localization moieties with isopeptide domains or isopeptide tags or both bound to a targeting moiety through an isopeptide bond, can be used to deliver payloads to cells targeted by the EV and/or exosome. In some instances, the payload is embedded in the vesicle, e.g., the lipid bilayer. Alternatively, or additionally, the payload can be surrounded by the vesicle or lipid bilayer.

[0200] As described above, molecules (e.g., a targeting moiety) bound to the vesicle localization moiety fusion protein (e.g., chimeric VLM fusion protein) through isopeptide bonds can traffic the EV and/or exosome in the body to target cells, and the molecules (e.g., a targeting moiety) bound by an isopeptide bond to the vesicle localization moiety fusion protein can also be involved in target cell recognition, interaction, and/or internalization. These molecule-vesicle localization moieties fusion protein (or chimeric VLM fusion protein) can also be used with nanoparticles and other delivery vehicles to be directed to a target cell. See György, Bence, et al. Biomaterials 35 (2014) 26:7598-7609. EV's with these molecule-vesicle localization moiety fusion proteins can also be fused with liposomes or encapsulate other delivery vehicles, such as adeno-associated viral vectors, gene therapy viral vectors, adeno-associated viruses or oncolytic viruses, to enhance their delivery to target cell(s). EV's, exosomes, microparticles, nanoparticles, etc. can carry a payload that is to be delivered to the target cell. Molecule-vesicle localization moiety (e.g., fusion proteins) on the EV and/or exosome can be used in combination with protein that are fused onto the EV and/or exosome surface to improve targeting. Examples of such proteins include apolipoproteins (Apo) A and E, receptor-associated protein (RAP), transferrin (Tf), lactotransferrin, melanotransferrin (p97), leptin, wheat germ agglutinin, non-toxic mutant of diptheria toxin (CRM197), rabies virus glycoprotein (RVG29), Angiopep-2, glutathione (GSH), THR, G23, and others. See Oller-Salvia et al., Chem Soc Rev 45:4690-4707 (2016).

[0201] Payloads can be, for example, a small molecule, polypeptide, nucleic acid, lipid, carbohydrate, ligand, receptor, reporter, drug, or combination of the foregoing (e.g., two or more drugs, or one or more drugs combined with a lipid, etc.). Examples of payloads, include, for example pharmaceuticals (e.g., small molecules), biologics (e.g., antibodies, recombinant proteins, or monoclonal antibodies), RNA (siRNA, shRNA, miRNA, antisense RNA, mRNA, noncoding RNA, tRNA, rRNA, other RNAs), reporters, lipids, carbohydrates, nucleic acid constructs (e.g., viral vectors, plasmids, lentivirus, expression constructs, other constructs), oligonucleotides, aptamers, cytotoxic agents, anti-inflammatory agents, antigenic peptides, small molecules, nucleic acid analogs (e.g., antisense oligonucleotide (ASO, 2′-O-methyl (OMe), 2′-fluoro (F), and 2′-O-methoxyethyl (MOE) RNA, locked nucleic acid (LNA), constrained ethyl (cEt), phosphorodiamidate morpholinos (PMOs), phosphorothioate, and peptide nucleic acid (PNA)), and nucleic acids and polypeptides for gene therapy. Payloads can also be complex molecular structures such as viral nucleic acid constructs (encoding transgenes) with accessory proteins for delivery to target cells where the nucleic acid construct can be (if needed) reverse transcribed, delivered to the nucleus, and integrated (or maintained extrachromosomally). Optionally, the construct with a desired transgene(s) can be specifically targeted to a site in the chromosome of the target cell using CRISPR/CAS (e.g., CAS9, CAS13a, CAS13b) and appropriate guide RNAs. Payloads may be loaded into the extracellular vesicle internal membrane space, displayed on, or partially or fully embedded in the lipid bi-layer surface of the extracellular vesicle or some combination thereof.

[0202] Examples of pharmaceutical and biologic payloads include drugs for treating diseases and syndromes, cytotoxic agents, and anti-inflammatory drugs. In some cases, the payloads can be fenretinide, sunitinib (e.g., sunitinib malate), sorafenib, Doxorubicin, Mertansine (i.e. DM1) or Imatinib (i.e. Gleevec, STI-571) or any combination thereof.

[0203] Examples of RNA payloads include siRNAs, miRNAs, shRNA, antisense RNAs, small nuclear RNA (snRNA), small nucleolar RNA (snoRNA), long intergenic noncoding RNA (lincRNA), piwi interacting RNA (piRNA), ribosomal RNA (rRNA), tRNA, yRNA, and rRNA.

[0204] Examples of noncoding RNA payloads include microRNA (miRNA), long non-coding RNA (lncRNA), small nuclear RNA (snRNA), small nucleolar RNA (snoRNA), long intergenic non-coding RNA (lincRNA), piwi-interacting RNA (piRNA), ribosomal RNA (rRNA), yRNA and transfer RNA (tRNA). miRNAs and incRNAs in particular are powerful regulators of homeostasis and cell signaling pathways, and delivery of such RNAs by an EV can impact the target cell. LncRNAs exceed 200 nucleotides in length and act concurrently with DNA-binding proteins and other elements to epigenetically regulate DNA transcription. lncRNAs can regulate gene expression and are involved in stem cell differentiation, and control of cellular activities.

[0205] Treatment payloads carried by the modified vesicles can include, for example nucleic acids such as miRNAs, mRNAs, siRNAs, anti-sense oligonucleotides (ASOs), DNA aptamers, CRISPR/Cas9 therapies that inhibit oncogenes, Cytotoxic transgene therapy to induce conditional toxicity, splice switching oligonucleotides or transgenes encoding toxic proteins. In some examples, the payload can be a nucleic acid payload listed in Table 13.

[0206] In some cases, a payload can be a reporter moiety. Reporters are moieties capable of being detected indirectly or directly. Reporters include, without limitation, a chromophore, a fluorophore, a fluorescent protein, a luminescent protein, a receptor, a hapten, an enzyme, and a radioisotope.

[0207] Examples of reporters include one or more of a fluorescent reporter, a bioluminescent reporter, an enzyme, and an ion channel. Examples of fluorescent reporters include, for example, green fluorescent protein from Aequorea victoria or Renilla reniformis, and active variants thereof (e.g., blue fluorescent protein, yellow fluorescent protein, cyan fluorescent protein, etc.); fluorescent proteins from Hydroid jellyfishes, Copepod, Ctenophora, Anthrozoas, and Entacmaea quadricolor, and active variants thereof; and phycobiliproteins and active variants thereof. Chemiluminescent reporters include, for example, placental alkaline phosphatase (PLAP) and secreted placental alkaline phosphatase (SEAP) based on small molecule substrates such as CPSD (Disodium 3-(4-methoxyspiro {1,2-dioxetane-3,2′-(5′-chloro)tricyclo [3.3.1.13,7]decan}-4-yl)phenyl phosphate, β-galactosidase based on 1,2-dioxetane substrates, neuraminidase based on NA-Star® substrate, all of which are commercially available from ThermoFisher Scientific. Bioluminescent reporters include, for example, aequorin (and other Ca+2 regulated photoproteins), luciferase based on luciferin substrate, luciferase based on Coelenterazine substrate (e.g., Renilla, Gaussia, and Metridina), and luciferase from Cypridina, and active variants thereof. In some embodiments, the bioluminescent reporter include, for example, North American firefly luciferase, Japanese firefly luciferase, Italian firefly luciferase, East European firefly luciferase, Pennsylvania firefly luciferase, Click beetle luciferase, railroad worm luciferase, Renilla luciferase, Gaussia luciferase, Cypridina luciferase, Metrida luciferase, OLuc, and red firefly luciferase, all of which are commercially available from ThermoFisher Scientific and/or Promega. Enzyme reporters include, for example, β-galactosidase, chloramphenicol acetyltransferase, horseradish peroxidase, alkaline phosphatase, acetylcholinesterase, and catalase. Ion channel reporters, include, for example, cAMP activated cation channels. The reporter or reporters may also include a Positron Emission Tomography (PET) reporter, a Single Photon Emission Computed Tomography (SPECT) reporter, a photoacoustic reporter, an X-ray reporter, and an ultrasound reporter.

[0208] Nucleic acid payloads can be oligonucleotides, recombinant polynucleotides, DNA, RNA, or otherwise synthetic nucleic acids. The nucleic acids can cause splice switching of RNAs in the target cell, turn off aberrant gene expression in the target cell, replace aberrant (mutated) genes in the chromosome of the target cell with genes encoding a desired sequence. The replacement nucleic acids can be an entire transgene or can be short segments of the mutated/aberrant gene that replaces the mutated sequence with a desired sequence (e.g., a wild-type sequence). Alternatively, the nucleic acid payloads can alter a wild-type gene sequence in the target cell to a desired sequence to produce a desired result. The payload nucleic acids can also introduce a transgene into the target cell that is not normally expressed. The payload nucleic acids can also cause desired deletions of nucleic acids from the genome of the target cell. Examples of nucleic acid payloads include, but are not limited to, those listed in Table 13.

[0209] Appropriate genome editing systems can be used with the payload nucleic acids such as CRISPR, TALEN, or Zinc-Finger nucleases. The efficiency of homologous and non-homologous recombination can be facilitated by genome editing technologies that introduce targeted double-stranded breaks (DSB). Examples of DSB-generating technologies are CRISPR/Cas9, TALEN, Zinc-Finger Nuclease, or equivalent systems. See, e.g., Cong et al. Science 339.6121 (2013): 819-823, Li et al. Nucl. Acids Res (2011): gkr188, Gaj et al. Trends in Biotechnology 31.7 (2013): 397405, all of which are incorporated by reference in their entirety for all purposes. Payload nucleic acids can be integrated into desired sites in the genome (e.g., to repair or replace nucleic acids in the chromosome of the target cell), or transgenes can be integrated at desired sites in the genome including, for example, genomic safe harbor site, such as, for example, the CCR5, AAVS1, human ROSA26, or PSIP1 loci. Sadelain et al., Nature Rev. 12:51-58 (2012); Fadel et al., J. Virol. 88(17):9704-9717 (2014); Ye et al., PNAS 111(26):9591-9596 (2014), all of which are incorporated by reference in their entirety for all purposes. When a CRISPR system is used, Cas9 in the target cell may be derived from a plasmid encoding Cas9, an exogenous mRNA encoding Cas9, or recombinant Cas9 polypeptide alone or in a ribonucleoprotein complex. Kim et al (2014) Genome 1012-19. doi:10.1101/gr.171322.113; Wang et al (2013) Cell 153 (4). Elsevier Inc.: 910-18. doi:10.1016/j.cell.2013.04.025, both of which are incorporated by reference in their entirety for all purposes.

### Introducing Payloads

[0210] Payloads can be incorporated into vesicles through several methods involving physical manipulation. Physical manipulation methods include but are not limited to, electroporation, sonication, mechanical vibration, extrusion through porous membranes, electric current and combinations thereof, which cause disruption of vesicle membrane. Loading of cargo to vesicles described herein may involve passive loading processes such as mixing, co-incubation, or active loading processes such as electroporation, sonication, mechanical vibration, extrusion through porous membranes, electric current and combinations thereof. In some embodiments, said loading can be done concomitantly with vesicle assembly.

[0211] Payloads of interest can be passively loaded into vesicles by incubation with payloads to allow diffusion into the vesicles along the concentration gradient. The hydrophobicity of the drug molecules can affect the loading efficiency. Hydrophobic drugs can interact with the lipid layers of the vesicle membrane and enable stable packaging of the drug in the vesicle's lipid bilayer. In some embodiments, purified exosome solution suspended in buffer solution can be incubated with payload. In some preferred embodiments, the payload is dissolved in a solvent mixture that can include DMSO, to allow passive diffusion into exosomes. Following this, the payload-exosomes mixture is made free from un-encapsulated payload. In preferred embodiments, centrifugation or size-exclusion columns are used to remove precipitates from the supernatant. LC/MS methods can be used for the measurement and characterization of payload in the exosome-payload formulation, following lysis and removal of the exosome fraction.

[0212] Nucleic acids of interest can be incubated with purified exosomes to allow transfection of purified exosomes in the presence of a suitable lipid-based transfection reagent. Centrifugation can be used to purify the suspension and isolate the transfected exosome population. Transfected exosomes can then be added to target cells or used in vivo.

[0213] Payload can be diffused into cells by incubation with cells that then produce exosomes that carry the payload. For example, cells treated with a drug can secrete exosomes loaded with the drug. In a previous example, Pascucci et al., have treated SR4987 mesenchymal stroma cells with a low dose of paclitaxel for 24 h, then washed the cells and reseeded them in a new flask with fresh medium. After 48 h of culture, the cell conditioned medium was collected, and exosomes were isolated. The paclitaxel-loaded exosomes from the treated cells had significant, strong anti-proliferative activities against CFPAC-1 human pancreatic cells in vitro, as compared with the exosomes from untreated cells (Pascucci, L. et al., Journal of Controlled Release, 192 (2014): 262-270.

[0214] Extracellular vesicles secreted from cells can be mixed with payloads and subsequently sonicated by using a homogenizer probe. The mechanical shear force from the sonicator probe can compromise the membrane integrity of the exosomes and subsequently allow the drug to diffuse into the exosomes during this membrane deformation, especially, a hydrophilic drug.

[0215] In another embodiment, extracellular vesicles from cells can be mixed with a payload, and the mixture can be loaded into a syringe-based lipid extruder with 100-400 nm porous membranes under a controlled temperature. The exosome membrane can be disrupted during the extrusion process can allow vigorous mixing with the drug. In some examples, the number of effective extrusions can vary from 1-10 to effectively deliver drugs into exosomes.

[0216] Payload of interest can be incubated with exosomes at room temperature for a fixed amount of time. Repeated freeze-thaw cycles are then performed to ensure drug encapsulation. The method can result in a broad distribution of size ranges for the resulting exosomes, and then, the mixture is rapidly frozen at −80° C. or in liquid nitrogen and thawed at room temperature. The number of effective freeze-thaw cycle may vary from 2-7 for effective encapsulation. In another embodiment, membrane fusion between exosomes and liposomes can be initiated through freeze-thaw cycles to create exosome-mimetic particles.

[0217] In another cases, small pores can be created in exosomes membrane through application of an electrical field to exosomes suspended in a conductive solution. The phospholipid bilayer of the exosomes can be disturbed by the electrical current. Payloads can subsequently diffuse into the interior of the exosomes via the pores. The integrity of the exosome membrane can then be recovered after the drug loading process. In some examples, nucleic acids, e.g., mRNA, siRNA or miRNA can be loaded into exosomes using this method.

[0218] In some cases, electroporation can be conducted in an optimized buffer such as trehalose disaccharide to aid in maintaining structural integrity and can inhibit the aggregation of exosomes.

[0219] Membrane permeabilization can be initiated through incubation with surfactants, such as, saponin. In some examples, hydrophilic molecules can be assisted in exosome encapsulation by this process.

[0220] Chemistry based approaches can also be used to directly attach molecules to the surfaces of exosomes via covalent bonds. In some examples, copper-catalyzed azide alkyne cycloaddition can be used for the bioconjugation of small molecules and macromolecules to the surfaces of exosomes as shown in Wang et al., 2015 and Hood et al., 2016—the references incorporated in their entirety.

[0221] In another embodiment, fluorophores and microbeads conjugated to highly specific antibodies can bind a particular antigen on the cell surface. Specific antigen-conjugated microbeads can be used for exosome isolation and tracking in vivo.

Introducing Nucleic Acid Payloads into EVs, Exosomes and Eukaryotic Cells

[0222] A process for introducing a desired nucleic acid (e.g., a transgene payload) to a cell or an EV includes a step of introducing the nucleic acid into a eukaryotic cell, EV or exosome. This step can be carried out ex vivo. For example, a cell, EV, or exosome can be transformed ex vivo with a virus vector or a non-virus vector carrying a desired nucleic acid.

[0223] In a process, a eukaryotic cell, EV, or exosome can be used. The eukaryotic cell, EV, or exosome can be derived from a mammal, for example, a human cell, or a cell derived from a non-human mammal such as a monkey, a mouse, a rat, a pig, a horse, or a dog can be used. The cell used in the process is not particularly limited, and any cell, EV or exosome can be used. The aforementioned cells, EVs, or exosomes may be collected from a living body, obtained by expansion culture of a cell collected from a living body, or established as a cell strain. When the EV or exosome is to be used in a living body the nucleic acids can be introduced into a cell collected from the living body itself.

[0224] The nucleic acids can be introduced to the eukaryotic cell by transfection (e.g., Gorman, et al. Proc. Natl. Acad. Sci. 79.22 (1982): 6777-6781, which is incorporated by reference in its entirety for all purposes), transduction (e.g., Cepko and Pear (2001) Current Protocols in Molecular Biology unit 9.9; DOI: 10.1002/0471142727.mb0909s36, which is incorporated by reference in its entirety for all purposes), calcium phosphate transformation (e.g., Kingston, Chen and Okayama (2001) Current Protocols in Molecular Biology Appendix 1C; DOI: 10.1002/0471142301.nsa01cs01, which is incorporated by reference in its entirety for all purposes), cell-penetrating peptides (e.g., Copolovici, Langel, Eriste, and Langel (2014) ACS Nano 2014 8 (3), 1972-1994; DOI: 10.1021/nn4057269, which is incorporated by reference in its entirety for all purposes), electroporation (e.g. Potter (2001) Current Protocols in Molecular Biology unit 10.15; DOI: 10.1002/0471142735.im1015s03 and Kim et al (2014) Genome 1012-19. doi:10.1101/gr.171322.113, Kim et al. 2014 describe the Amaza Nucleofector, an optimized electroporation system, both of these references are incorporated by reference in their entirety for all purposes), microinjection (e.g., McNeil (2001) Current Protocols in Cell Biology unit 20.1; DOI: 10.1002/0471143030.cb2001s18, which is incorporated by reference in its entirety for all purposes), liposome or cell fusion (e.g., Hawley-Nelson and Ciccarone (2001) Current Protocols in Neuroscience Appendix IF; DOI: 10.1002/0471142301.nsa01fs10, which is incorporated by reference in its entirety for all purposes), mechanical manipulation (e.g. Sharon et al. (2013) PNAS 2013 110(6); DOI: 10.1073/pnas.1218705110, which is incorporated by reference in its entirety for all purposes) or other well-known technique for delivery of nucleic acids to eukaryotic cells.

[0225] Once introduced, the nucleic acid can exist episomally, or can be integrated into the genome of the eukaryotic cell using well known techniques such as recombination (e.g., Lisby and Rothstein (2015) Cold Spring Harb Perspect Biol. March 2; 7(3). pii: a016535. doi: 10.1101/cshperspect.a016535, which is incorporated by reference in its entirety for all purposes), or non-homologous integration (e.g., Deyle and Russell (2009) Curr Opin Mol Ther. 2009 August; 11(4):442-7, which is incorporated by reference in its entirety for all purposes). The efficiency of homologous and non-homologous recombination can be facilitated by genome editing technologies that introduce targeted double-stranded breaks (DSB). Examples of DSB-generating technologies are CRISPR/Cas9, TALEN, Zinc-Finger Nuclease, or equivalent systems (e.g., Cong et al. Science 339.6121 (2013): 819-823, Li et al. Nucl. Acids Res (2011): gkr188, Gaj et al. Trends in Biotechnology 31.7 (2013): 397-405, all of which are incorporated by reference in their entirety for all purposes), transposons such as Sleeping Beauty (e.g., Singh et al (2014) Immunol Rev. 2014 January; 257(1):181-90. doi: 10.1111/imr.12137, which is incorporated by reference in its entirety for all purposes), targeted recombination using, for example, FLP recombinase (e.g., O'Gorman, Fox and Wahl Science (1991) 15:251(4999):1351-1355, which is incorporated by reference in its entirety for all purposes), CRE-LOX (e.g., Sauer and Henderson PNAS (1988): 85; 5166-5170), or equivalent systems, or other techniques known in the art for integrating the nucleic acid into the eukaryotic cell genome.

[0226] The nucleic acids can be integrated into a chromosome of the eukaryotic cell or can be present in the eukaryotic cell extra-chromosomally. The nucleic acids can be integrated using a genome editing enzyme (CRISPR, TALEN, Zinc-Finger nuclease), and appropriate nucleic acids. The nucleic acids can encode a transgene which can be integrated into the eukaryotic cell chromosome at a genomic safe harbor site, such as, for example, the CCR5, AAVS1, human ROSA26, or PSIP1 loci. The integration of the nucleic acid encoding the transgene at the CCR5, PSIP1, or TRAC locus (T-cell receptor α constant locus) can be done using a gene editing system, such as, for example, CRISPR, TALEN, Sleeping Beauty Transposase, PiggyBac transposase, or Zinc-Finger nuclease systems. Eyquem et al., Nature 543:113-117 (2017), which is incorporated by reference in its entirety for all purposes. The eukaryotic cell can be a human and a CRISPR system can be used to integrate the transgene at the CCR5 or PSIP1 locus. Integration of the nucleic acid at CCR5, PSIP1, or TRAC locus using the CRISPR system also may delete a portion, or all, of the CCR5 gene, PSIP1 gene, or TRAC locus. Cas9 in the eukaryotic cell may be derived from a plasmid encoding Cas9, an exogenous mRNA encoding Cas9, or recombinant Cas9 polypeptide alone or in a ribonucleoprotein complex. Kim et al (2014) Genome 1012-19. doi:10.1101/gr.171322.113; Wang et al (2013) Cell 153 (4). Elsevier Inc.: 910-18. doi:10.1016/j.cell.2013.04.025, both of which are incorporated by reference in their entirety for all purposes.

[0227] Chemical means for introducing a polynucleotide into a eukaryotic cell include colloidal dispersion systems, such as macromolecule complexes, nanocapsules, microspheres, beads, and lipid-based systems including oil-in-water emulsions, micelles, mixed micelles, and liposomes. An exemplary colloidal system for use as a delivery vehicle in vitro and in vivo is a liposome (e.g., an artificial membrane vesicle). Other methods of state-of-the-art targeted delivery of nucleic acids are available, such as delivery of polynucleotides with targeted nanoparticles or other suitable sub-micron sized delivery system. Nucleic acids can also be loaded into EVs, liposomes or other vesicles using the techniques of Haraszhi et al., Bio. Protocol. 7:e2338, DOI: 10.21769/BioProtoc.2338 (2017), which is incorporated by reference in its entirety for all purposes.

[0228] Transduction can be done with a virus vector such as a retrovirus vector (including an oncoretrovirus vector, a lentivirus vector, and a pseudo type vector), an adenovirus vector, an adeno-associated virus (AAV) vector, a simian virus vector, a vaccinia virus vector or a sendai virus vector, an Epstein-Barr virus (EBV) vector, and a HSV vector can be used. As the virus vector, a virus vector lacking the replicating ability so as not to self-replicate in an infected cell is preferably used.

[0229] When a retrovirus vector is used to transduce the host cell, the process can be carried out by selecting a suitable packaging cell based on an LTR sequence and a packaging signal sequence possessed by the vector and preparing a retrovirus particle using the packaging cell. Examples of the packaging cell include PG13 (ATCC CRL-10686), PA317 (ATCC CRL-9078), GP+E-86 and GP+envAm-12 (U.S. Pat. No. 5,278,056, which is incorporated by reference in its entirety for all purposes), and Psi-Crip (Proceedings of the National Academy of Sciences of the United States of America, vol. 85, pp. 6460-6464 (1988), which is incorporated by reference in its entirety for all purposes). A retrovirus particle can also be prepared using a 293 cell or a T cell having high transfection efficiency. Many kinds of retrovirus vectors produced based on retroviruses and packaging cells that can be used for packaging of the retrovirus vectors are widely commercially available from many companies.

[0230] A number of viral based systems have been developed for gene transfer into mammalian cells. A desired nucleic acid (can encode one or multiple genes, or functional RNAs, or other nucleic acids) can be inserted into a vector and packaged in viral particles using techniques known in the art. The recombinant virus can then be isolated and delivered to cells of the subject either in vivo or ex vivo. A number of viral systems are known in the art. Adenovirus vectors can be used. A number of adenovirus vectors are known in the art and can be used. In addition, lentivirus vectors can be used.

[0231] An expression construct can be used in combination with a liposome (or an EV) and a condensing agent such as a cationic lipid as described in WO 96/10038, WO 97/18185, WO 97/25329, WO 97/30170 and WO 97/31934 (which are incorporated herein by reference in their entirety for all purposes).

[0232] Chemical structures with the ability to promote stability and/or translation efficiency can be used. The RNA preferably has 5′ and 3′ UTRs. The 5′ UTR can be between one and 3000 nucleotides in length. The length of 5′ and 3′ UTR sequences to be added to the coding region can be altered by different methods, including, but not limited to, designing primers for PCR that anneal to different regions of the UTRs. Using this approach, the 5′ and 3′ UTR lengths can be modified to achieve optimal translation efficiency following transfection of the transcribed RNA. The 5′ and 3′ UTRs can be the naturally occurring, endogenous 5′ and 3′ UTRs for the nucleic acid of interest. The UTR sequences that are not endogenous to the nucleic acid of interest can be added by incorporating the UTR sequences into the forward and reverse primers or by other modification techniques applied to the template. The use of UTR sequences that are not endogenous to the nucleic acid of interest can be useful for modifying the stability and/or translation efficiency of the RNA. For example, it is known that AU-rich elements in 3′UTR sequences can decrease the stability of mRNA. Therefore, 3′ UTRs can be selected or designed to increase the stability of the transcribed RNA based on properties of UTRs that are well known in the art.

[0233] The mRNA may have both a cap on the 5′ end and a 3′ poly(A) tail which determine ribosome binding, initiation of translation and stability mRNA in the cell. On a circular DNA template, for instance, plasmid DNA, RNA polymerase produces a long concatameric product which is not suitable for expression in eukaryotic cells. The transcription of plasmid DNA linearized at the end of the 3′ UTR results in normal sized mRNA which is not effective in eukaryotic transfection even if it is polyadenylated after transcription.

[0234] In the step of introducing a nucleic acid into a cell, a functional substance for improving the introduction efficiency can also be used (e.g. WO 95/26200 and WO 00/01836, which are incorporated herein by reference in their entirety for all purposes). Examples of the substance for improving the introduction efficiency include a substance having ability to bind to a virus vector, for example, fibronectin and a fibronectin fragment. A fibronectin fragment can have a heparin binding site, for example, a fragment commercially available as RetroNetcin (registered trademark, CH-296, manufactured by TAKARA BIO INC.) can be used. Also, polybrene which is a synthetic polycation having an effect of improving the efficiency of infection of a retrovirus into a cell, a fibroblast growth factor, V type collagen, polylysine or DEAE-dextran can be used. The functional substance can be immobilized on a suitable solid phase, for example, a container used for cell culture (plate, petri dish, flask or bag) or a carrier (microbeads etc.).

[0235] Packaging of polypeptides, nucleic acids, and/or drugs placed inside EVs and exosomes can be conducted via incubation in cell culture in a similar manner to the methods described to engineer EVs with certain surface proteins. See above. For example, methods can be used such as those described in McNaughton et al., Proc. Natl Acad Sci 106:6111-16 (2009), or Kotmakci et al., J. Pharm. Pharm. Sci. 18:396-413 (2015), both of which are incorporated by reference in their entirety for all purposes. Specifically, the parental EV or EV subpopulation produced from regular flask/dish culture or bioreactor culture of transfected cells or non-transfected cells can be directly incorporated with the polypeptide, nucleic acid or small molecule via electroporation of the EV and polypeptide, nucleic acid or small molecule. The controlled electric pulse creates the permeabilized area on the EV surface membrane for polypeptide, nucleic acid or small molecule insertion/incorporation. Electroporation requires an incubation period after the electroporation process in order to ensure that the membrane is recovered. Additionally, drug loading after EV isolation may be achieved by simple incubation of the drug of interest with isolated exosomes. This allows loading of lipophilic molecules in the lipid bilayer of the EVs. Other methods for polypeptides, nucleic acids, and/or drugs include lipofectamine and packaging the payloads during biogenesis in transfected cells.

### Target Cells

[0236] The vesicles described herein can be used to selectively target a cell, tissue, or organ of interest. The target may be on a cell, in a cell (e.g. in the cell nucleus for nucleus targeting) or in an extracellular matrix.

[0237] In some embodiments, the target cell is an eukaryotic cell. A target cell can be a cell from an animal such as a mouse, rat, rabbit, hamster, porcine, bovine, feline, or canine. The target cells can be mammalian cells, such as mouse, rat, rabbit, hamster, porcine, bovine, feline, or canine. The mammalian cells can be cells of primates, including but not limited to, monkeys, chimpanzees, gorillas, and humans. The mammalians cells can be mouse cells, as mice routinely function as a model for other mammals, most particularly for humans. See, e.g., Hanna, J. et al., Science 318:1920-23, 2007; Holtzman, D. M. et al., J Clin Invest. 103(6):R15-R21, 1999; Warren, R. S. et al., J Clin Invest. 95: 1789-1797, 1995; each publication is incorporated by reference in its entirety for all purposes. Animal cells include, for example, fibroblasts, epithelial cells (e.g., renal, mammary, prostate, lung), keratinocytes, hepatocytes, adipocytes, endothelial cells, and hematopoietic cells. The animal cells can be adult cells (e.g., terminally differentiated, dividing or non-dividing) or embryonic cells (e.g., blastocyst cells, etc.) or stem cells.

[0238] The target cell also can be a cell line derived from an animal or other source. Examples of specific cell lines include HEK293 and variants of HEK293 such as HEK293T, ARPE19, NS0, NS1 (mice cell lines), CHO-K1 (general CHO), GS-CHO, CHO-DG44 (Chinese hamster ovary, HeLa, PER.C6, Epi293, Expi293F (ThermoFisher, Catalog No. A14527) and hTERT.

[0239] The target cells can be stem cells. A variety of stem cells types are known in the art and can be used as the target cell, including for example, embryonic stem cells, inducible pluripotent stem cells, hematopoietic stem cells, neural stem cells, epidermal neural crest stem cells, mammary stem cells, intestinal stem cells, mesenchymal stem cells, olfactory adult stem cells, testicular cells, and progenitor cells (e.g., neural, angioblast, osteoblast, chondroblast, pancreatic, epidermal, etc.). The stem cells can be stem cell lines derived from cells taken from a subject.

[0240] Target cells can also be any of musculoskeletal cells, kidney cells, neural cells, brain cells, blood-brain barrier cells, cardiac muscle cells, and liver cells.

### Pharmaceutical Compositions

[0241] Pharmaceutical compositions disclosed herein may comprise modified extracellular vesicles of the invention and/or liposomes with (or without) a payload, as described herein, in combination with one or more pharmaceutically or physiologically acceptable carriers, diluents or excipients. Such compositions may comprise buffers such as neutral buffered saline, phosphate buffered saline and the like; carbohydrates such as glucose, mannose, sucrose or dextrans, mannitol; proteins; polypeptides or amino acids such as glycine; antioxidants; chelating agents such as EDTA or glutathione; adjuvants (e.g., aluminum hydroxide); and preservatives. Compositions are in one aspect formulated for intravenous administration or intracranial administration or intranasal administration to the central nervous system. Compositions described herein may include lyophilized EVs (e.g., exosomes). In a preferred embodiment, composition comprises an EV or exosome and a pharmaceutically acceptable excipient.

[0242] In some embodiments, a composition herein comprises an isolated or enriched set of vesicles that selectively target a tissue or cell of interest. Such vesicles can be loaded with a payload as described herein to be delivered to the cell or tissue of interest. In an embodiment, such vesicles that selectively target a tissue or cell of interest may be an EV or exosome comprising: (1) a VLM or chimeric VLM fusion protein comprising one or more isopeptide domain(s) and a VLM or chimeric VLM; and (2) one or more cell or tissue targeting moiety(ies) of interest linked to an isopeptide tag; wherein (1) and (2) are covalently attached through one or more isopeptide bond(s). In another embodiment, such vesicles that selectively target a tissue or cell of interest may be an EV or exosome comprising: (1) a VLM or chimeric VLM fusion protein comprising one or more isopeptide tag(s) and a VLM or chimeric VLM; and (2) one or more cell or tissue targeting moiety(ies) of interest linked to an isopeptide domain; wherein (1) and (2) are covalently attached through one or more isopeptide bond(s). In another embodiment, such vesicles that selectively target a tissue or cell of interest may be an EV or exosome comprising: (1) a VLM or chimeric VLM fusion protein comprising one or more isopeptide tag(s) and/or isopeptide domain(s) and a VLM or chimeric VLM; and (2) one or more cell or tissue targeting moiety(ies) of interest linked to an isopeptide domain or isopeptide tag; wherein (1) and (2) are covalently attached through one or more isopeptide bond(s). In an embodiment, cell targeting moiety(ies) may be a polypeptide, peptide, nucleic acid, nucleic acid analogs, carbohydrate, lipid, ligand, aptamer, chemical compound, macromolecule or other molecules.

[0243] In one embodiment of the invention, the chimeric vesicle localization moiety may comprise a surface-and-transmembrane domain of a first vesicle localization moiety and a cytosolic domain of a second vesicle localization moiety. In a preferred embodiment, the first and second vesicle localization moieties are distinct/different proteins and not isoforms. In a preferred embodiment, the first and second vesicle localization moieties are distinct/different proteins and not an allelic variant. In a preferred embodiment, the first and second vesicle localization moieties are distinct/different proteins and not a homolog. In a preferred embodiment, the first and second vesicle localization moieties are distinct/different proteins and not an ortholog. In an embodiment, the first and second vesicle localization moieties are distinct/different proteins but are paralogs. In a preferred embodiment, the first and second vesicle localization moieties are distinct/different proteins and are not paralogs.

[0244] In an embodiment, the first and second vesicle localization moieties are distinct/different proteins from a eukaryote or of eukaryotic origin. The eukaryote may include any of animal, plant, fungi, and protist. In an embodiment, the first and second vesicle localization moieties are distinct/different proteins from a mammal or of mammalian origin. The mammal may include, but is not limited to, a human, monkey, chimpanzee, ape, gorilla, cattle, pig, sheep, horse, donkey, kangaroo, rat, mouse, guinea pig, hamster, cat, dog, rabbit and squirrel. In an embodiment, the first and second vesicle localization moieties are distinct/different proteins from a human or of human origin.

[0245] In an embodiment, the chimeric vesicle localization moiety is obtained using recombinant DNA methods. The chimeric vesicle localization moiety can be produced from expression of a nucleic acid encoding amino acid sequence of the 1^{st} vesicle localization moiety and the 2^{nd} vesicle localization moiety. The nucleic acid encoding the chimeric vesicle localization moiety can be introduced into an expression vector or system. Examples of nucleic acid sequences are provided in the Tables herein and the Sequence Listing provided herewith. The expression vector or system may be introduced into a cell which expresses the chimeric vesicle localization moiety (or a vesicle localization moiety) as a polypeptide or fusion protein, optionally with a signal peptide sequence at its amino terminus. In an embodiment, preferably the cell is a mammalian cell, more preferably a human cell. In an embodiment, the expression vector or system may be introduced into a producer cell, which produces extracellular vesicles, preferably exosomes. In the case of VLM or chimeric VLM fusion protein produced from an expression vector introduced into a producer cell, the nucleic acid encoding the VLM or chimeric VLM fusion protein additionally comprises a sequence for a signal peptide at the start (5′ end) of the coding sequence. In an embodiment, the producer cell is a mammalian cell. In a preferred embodiment, the producer cell is a human cell. Alternatively, the expression vector or system may be used in an in vitro transcription and translation system to produce a chimeric vesicle localization moiety fusion protein as a polypeptide. In an embodiment, the in vitro produced chimeric vesicle localization moiety fusion protein may be isolated. In an embodiment, an isolated chimeric vesicle localization moiety fusion protein may be introduced into an extracellular vesicle or exosome isolated from cells. In the case of VLM or chimeric VLM produced from an expression vector using an in vitro transcription and translation system, the nucleic acid encoding the VLM or chimeric VLM fusion protein preferably lacks a sequence for a signal peptide at the start (5′ end) of the coding sequence.

[0246] Examples of suitable and preferred first and second vesicle localization moieties include, but are not limited to, ADAM10, ALCAM, CLSTN1, IGSF8, IL3RA, ITGA3, ITGB1, LAMP2, LILRB4, PTGFRN, and SELPLG. Examples of some resulting chimeric vesicle localization moieties may be seen in Table 4 (e.g., SEQ ID NO: 116, 118, 120, 122, 124 and 126, encoded by nucleic acid SEQ ID NO: 115, 117, 119, 121, 123 and 125, respectively). Further examples of suitable vesicle localization moieties may include, but are not limited to, a growth factor receptor, Fc receptor, interleukin receptor, immunoglobulin, MHC-I or MHC-II component, CD antigen, and escort protein. Examples of suitable second vesicle localization moieties include, but are not limited to, the same examples as described for the first vesicle localization moieties.

[0247] The vesicle-localization moiety may further comprise a peptide or protein with a modified amino acid. The modified amino acid may result from an attachment of a hydrophobic group. The attachment of a hydrophobic group may be myristoylation for attachment of myristate, palmitoylation for attachment of palmitate, prenylation for attachment of a prenyl group, farnesylation for attachment of a farnesyl group, geranylgeranylation for attachment of a geranylgeranyl group or glycosylphosphatidylinositol (GPI) anchor formation for attachment of a glycosylphosphatidylinositol comprising a phosphoethanolamine linker, glycan core and phospholipid tail. The attachment of a hydrophobic group may be performed by chemical synthesis in vitro or is performed enzymatically in a post-translational modification reaction.

[0248] Examples of the first and second vesicle localization moieties include, but are not limited to, any of ACE, ADAM10, ADAM15, ADAM9, AGRN, ALCAM, ANPEP, ANTXR2, ATP1A1, ATP1B3, BSG, BTN2A1, CALM1, CANX, CD151, CD19, CD1A, CD1B, CD1C, CD2, CD200, CD200R1, CD226, CD247, CD274, CD276, CD33, CD34, CD36, CD37, CD3E, CD40, CD40LG, CD44, CD47, CD53, CD58, CD63, CD81, CD82, CD84, CD86, CD9, CHMP1A, CHMP1B, CHMP2A, CHMP3, CHMP4A, CHMP48, CHMP5, CHMP6, CLSTN1, COL6A1, CR1, CSF1R, CXCR4, DDOST, DLL1, DLL4, DSG1, EMB, ENG, EVI2B, F11R, FASN, FCER1G, FCGR2C, FLOT1, FLOT2, FLT3, FN1, GAPDH, GLG1, GRIA2, GRIA3, GYPA, HSPG2, ICAM1, ICAM2, ICAM3, IGSF8, IL1RAP, IL3RA, IL5RA, IST1, ITGA2, ITGA2B, ITGA3, ITGA4, ITGA5, ITGA6, ITGAL, ITGAM, ITGAV, ITGAX, ITGB1, ITGB2, ITGB3, ITGB4, ITGB5, ITGB6, ITGB7, JAG1, JAG2, KIT, LAMP2, LGALS3BP, LILRA6, LILRB1, LILRB2, LILRB3, LILRB4, LMAN2, LRRC25, LY75, M6PR, MFGE8, MMP14, MPL, MRC1, MVB12B, NECTIN1, NOMO1, NOTCH1, NOTCH2, NOTCH3, NOTCH4, NPTN, NRP1, PDCD1, PDCD1LG2, PDCD6IP, PDGFRB, PECAM1, PLXNB2, PLXND1, PROM1, PTGES2, PTGFRN, PTPRA, PTPRC, PTPRJ, PTPRO, RPN1, SDC1, SDC2, SDC3, SDC4, SDCBP, SDCBP2, SELPLG, SIGLEC7, SIGLEC9, SIRPA, SLIT2, SNF8, SPN, STX3, TACSTD2, TFRC, TLR2, TMED10, TNFRSF8, TRAC, TSG101, TSPAN14, TSPAN7, TSPAN8, TYROBP, VPS25, VPS28, VPS36, VPS37A, VPS37B, VPS37C, VPS37D, VPS4A, VPS4B, VTI1A, or VTI1B or a homologue thereof; or variant thereof; or a combination thereof. Amino acid sequences and associated nucleic acid encoding sequences for the vesicle localization moieties (above) may be obtained in Tables 2 and 3; where the sequences are not directly provided in the table, the sequences may be obtained from provided Accession Number and database referred to in the tables.

[0249] In an embodiment, the first and second vesicle localization moieties from which a chimeric vesicle localization moiety is derived may be from any of the transmembrane proteins listed in Table 2 or 3 or a homologue thereof. In an embodiment, the chimeric vesicle localization moiety comprises a surface-and-transmembrane domain of a 1^{st} vesicle localization moiety selected from any of the transmembrane protein listed in Table 2 or a homologue thereof and a cytosolic domain of a 2^{nd} vesicle localization moiety selected from any of the transmembrane protein listed in Table 3 or a homologue thereof. In a separate embodiment, the chimeric vesicle localization moiety comprises a surface-and-transmembrane domain of a 1^{st} vesicle localization moiety selected from any of the transmembrane protein listed in Table 3 or a homologue thereof and a cytosolic domain of a 2^{nd} vesicle localization moiety selected from any of the transmembrane protein listed in Table 2 or a homologue thereof. In a preferred embodiment, the chimeric vesicle localization moiety comprises a surface-and-transmembrane domain of a 1^{st} vesicle localization moiety selected from any of the transmembrane protein listed in Table 2 or a homologue thereof and a cytosolic domain of a 2^{nd} vesicle localization moiety from any of the transmembrane protein listed in Table 2 or a homologue thereof, but not selected for the 1^{st} vesicle localization domain.

[0250] In an embodiment, nucleic acid sequences as provided in Tables 2 or through the accession number in Table 3 may be used to produce a chimeric vesicle localization moiety through recombinant DNA method. In an embodiment, the next adjacent amino acid of a surface domain is followed and joined to first amino acid of a transmembrane domain and the last amino acid of the transmembrane domain is joined to the first amino acid of a cytosolic domain. In an embodiment, a vesicle localization moiety in Tables 2 and 3 comprises a transmembrane protein in which from amino-to-carboxyl terminal direction, last amino acid of a surface domain is joined to first amino acid of a transmembrane domain, and further, last amino acid of the transmembrane domain is joined to first amino acid of a cytosolic domain. Note additional presence of a signal peptide sequence with its last amino acid joined to the first amino acid of the surface domain for the amino acid sequences in Table 2 and the nucleic acid sequences in Table 2 or the vesicle localization moiety coding sequences associated with each ENST number in Table 3. During cellular expression, the signal peptide is cleaved from the nascent protein to produce a mature vesicle localization moiety found associated with an EV. For example, the full length vesicle localization moiety for Lamp2 with its native signal sequence (SEQ ID NO: 94) following processing results in a mature Lamp2 (SEQ ID NO: 112) lacking the first 28 amino acids which make up the Lamp2 signal sequence; similarly, CLSTN1 with its signal sequence (SEQ ID NO: 76) following processing results in a mature CLSTN1 (SEQ ID NO: 114) lacking first 28 amino acids which make up the CLSTN1 signal sequence, and IGSF8 with its signal sequence (SEQ ID NO: 78) results in a mature IGSF8 (SEQ ID NO: 128) lacking the first 27 amino acid sequence which makes up the IGSF8 signal sequence. Tables 2 and 3 provide full-length vesicle localization moieties with signal peptides and nucleic acid coding sequences. Amino acid sequences of vesicle localization moieties and amino acid sequences for signal peptide, surface domain, transmembrane domain and cytosolic domain along with nucleic acid coding sequences may additionally be accessed through accession numbers associated with the UniProtKB and Ensembl ENSP and ENST identifiers.

[0251] In an embodiment, the chimeric vesicle localization moiety comprises a surface-and-transmembrane domain of a 1^{st} vesicle localization moiety and a cytosolic domain of a 2^{nd} vesicle localization moiety. The 1^{st} vesicle localization moiety may include any of ADAM10, ALCAM, CLSTN1, IGSF8, IL3RA, ITGA3, ITGB1, LAMP2, LILRB4, PTGFRN or SELPLG or a homologue thereof or variant thereof. The 2^{nd} vesicle localization moiety may be selected from the same group of transmembrane proteins so long as the first and second vesicle localization moieties are from different or non-homologous proteins. Amino acid sequences and nucleic acid sequences encoding ADAM10, ALCAM, CLSTN1, IGSF8, IL3RA, ITGA3, ITGB1, LAMP2, LILRB4, PTGFRN, and SELPLG are provided in Table 2 along with Ensembl ENSP and ENST identifiers (Hunt, S. E. et al. (2018) Database, 2018, 1-12; doi: 10.1093/database/bay119; Yates, A. D. et al., (2019) Nucleic Acids Res. 48:D682-D688).

[0252] In a preferred embodiment, the chimeric vesicle localization moiety comprises a LAMP2 surface-and-transmembrane domain (amino acid sequence and nucleic acid sequence for LAMP2 may be obtained under Accession Number ENSP00000360386 encoded by Transcript ID ENST00000371335 from Gene ID ENSG00000005893, based on assembled sequence in Genome Reference Consortium Human Build 38 patch release 13 (GRCh38.p13; GenBank assembly accession GCA_000001405.28 and RefSeq assembly accession GCF_000001405.39)). In a preferred embodiment, LAMP2 protein with Accession Number ENSP00000360386 encoded by Transcript ID ENST00000371335 is LAMP2B. The chimeric vesicle localization moiety comprising a LAMP2 surface-and-transmembrane domain additionally comprises a cytosolic domain of ADAM10, ALCAM, CLSTN1, IGSF8, IL3RA, ITGA3, ITGB1, LILRB4, PTGFRN, or SELPLG or a homologue or portion thereof. In a preferred embodiment, the chimeric vesicle localization moiety comprising LAMP2 surface-and-transmembrane domains additionally comprises a cytosolic domain of PTGFRN, ITGA3, IL3RA, SELPLG, ITGB1, or CLSTN1 or a homologue or portion thereof, but lacks the LAMP2 cytosolic domain.

[0253] In one embodiment, the homologue or portion may retain at least about 80% or at least about 90% of cytosolic domain activity of PTGFRN, ITGA3, IL3RA, SELPLG, ITGB1, or CLSTN1 which may be determined by detecting its accumulation at an extracellular vesicle. Accumulation may be assessed for a chimeric vesicle localization moiety on the basis of the percent of extracellular vesicle positive for the chimeric vesicle localization moiety, and/or the mean abundance of localization moiety in an extracellular vesicle positive for the localization moiety and ignoring extracellular vesicles lacking the localization moiety, as measured by vesicle flow cytometry. The mean abundance of localization moiety in an extracellular vesicle may be the mean concentration, density or amount of localization moiety in an extracellular vesicle positive for the localization moiety. In an embodiment, an alternative measure can also be used, including total number of extracellular vesicles positive for the localization moiety.

[0254] In an embodiment, a homologue is an ortholog derived from a common ancestral gene and encodes a protein with the same function in different species. In an embodiment, a homologue is a paralog derived from a homologous gene that has evolved by gene duplication and encodes for a protein with similar but not identical function. Homologous proteins, including orthologs and paralogs, may be identified based on amino acid sequences, curated, grouped and aligned in publicly available databases, such as HomoloGene at the National Center for Biotechnology Information of the National Institutes of Health (NCBI Resource Coordinators (2016) Database resources of the National Center for Biotechnology Information. Nucleic Acids Res. 44:D7-D9), OrthoDB (Waterhouse, R. M. et al. (2011) OrthoDB: the hierarchical catalog of eukaryotic orthologs in 2011. Nucleic Acids Res. 39:D283-8), HOGENOM (Penel, S. et al. (2009) Databases of homologous gene families for comparative genomics. BMC Bioinformatics 10:53), TreeFam (Ruan, J. et al. (2008) TreeFam: 2008 Update. Nucleic Acids Res. 36: D735-D740), Gene Sorter (Kent, W. J. et al. (2005) Exploring relationships and mining data with the UCSC Gene Sorter. Genome Res. 15:737-41), and InParanoid (Sonnhammer, E. L. L. and Östlund, G. (2015) InParanoid 8: orthology analysis between 273 proteomes, mostly eukaryotic. Nucleic Acids Res. 43:D234-D239).

[0255] Pharmaceutical compositions may be administered in a manner appropriate to the disease to be treated (or prevented). The quantity and frequency of administration will be determined by such factors as the condition of the patient, and the type and severity of the patient's disease, although appropriate dosages may be determined by clinical trials.

[0256] Suitable pharmaceutically acceptable excipients are well known to a person skilled in the art. Merely by way of example, excipients include, but are not limited to, surfactants, lipophilic vehicles, hydrophobic vehicles, sodium citrate, calcium carbonate, and dicalcium phosphate. Examples of pharmaceutically acceptable excipients include phosphate buffered saline (e.g. 0.01 M phosphate, 0.138 M NaCl, 0.0027 M KCl, pH 7.4), an aqueous solution containing a mineral acid salt such as a hydrochloride, a hydrobromide, a phosphate, or a sulfate, saline, a solution of glycol or ethanol, and a salt of an organic acid such as an acetate, a propionate, a malonate or a benzoate. An adjuvant such as a wetting agent or an emulsifier, and a pH buffering agent can also be used. The pharmaceutically acceptable excipients described in Remington's Pharmaceutical Sciences (Mack Pub. Co., N.J. 1991)(which is incorporated herein by reference in its entirety for all purposes) can be appropriately used. The composition can be formulated into a known form suitable for parenteral administration, for example, injection or infusion. The composition may comprise formulation additives such as a suspending agent, a preservative, a stabilizer and/or a dispersant, and a preservation agent for extending a validity term during storage.

[0257] The administration of the subject compositions may be carried out in any convenient manner, including by aerosol inhalation, injection, ingestion, transfusion, implantation or transplantation. The compositions described herein may be administered to a patient trans arterially, subcutaneously, intradermally, intratumorally, peritumorally, intrathecally, via intraventricular delivery, intrasternal delivery, intranodally, intramedullary, intramuscularly, intranasally, intraarterially, into an afferent lymph vessel, by intravenous (i.v.) injection, intracranial injection, intramuscular injection, subcutaneous injection, intradermal injection, or intraperitoneally. In one aspect, the compositions of the present invention are administered to a patient by intradermal or subcutaneous injection. In one aspect, the modified vesicles compositions described herein are administered by i.v. injection. Compositions can be administered in a way which allows them to cross the blood-brain barrier, vascular barrier, or other epithelial barrier

[0258] When “an immunologically effective amount” or “therapeutic amount” is indicated, the precise amount of the compositions of the present invention to be administered can be determined by a physician with consideration of individual differences in age, weight, tumor size, extent of infection or metastasis, disease condition or condition to be treated, and condition of the patient (subject). As used herein, a “subject” means a mammal. The mammal can be a human or an animal such as a non-human primate, mouse, rat, dog, cat, horse, monkey, ape, rabbit or cow, but are not limited to these examples. Mammals, other than humans, can be advantageously used as subjects that represent animal models of disorders associated with, e.g., cancer. In addition, the methods and compositions described herein can be used to treat domesticated animals and/or pets. The terms, “patient” and “subject” are used interchangeably. A subject can be male or female.

[0259] A pharmaceutical composition comprising the modified or engineered EVs or exosomes described herein may be administered at a dosage of 10⁴ to 10¹² EV/kg body weight, or 10⁴ to 10⁹ EV/kg body weight, or 10⁶ to 10⁹ EV/kg bodyweight, in some instances 1 ug to 1 mg exosomal proteins per dose, including all integer values within those ranges. An EV and/or exosome composition may also be administered multiple times at these dosages. EVs and/or exosomes can also be administered by using infusion techniques that are commonly known.

### Uses of EVs of the Invention

[0260] EVs of the invention have many of the desirable features of an ideal drug delivery system, such as a long circulating half-life, the intrinsic ability to target tissues, biocompatibility, and minimal or no inherent toxicity issues. Diseases that can be treated with the engineered EVs and/or exosomes described herein using an effective amount thereof include, for example, skeletal muscle disorders, renal diseases, neurodegenerative disorders, cancers (e.g. a hepatocarcinoma), cardiovascular disease, and liver diseases. In an embodiment, the engineered EV and/or exosome comprises a targeting moiety, a VLM and an isopeptide bond that operationally links a targeting moiety to a VLM and optionally a payload. In a preferred embodiment, the engineered EV and/or exosome comprises a targeting moiety, a chimeric VLM and an isopeptide bond that operationally links a targeting moiety to a chimeric VLM and optionally a payload.

[0261] The desired amount of molecule-vesicle localization moiety fusion protein or targeting moiety fusion protein (or conjugate)-VLM (or chimeric VLM) fusion protein on an engineered EV and/or exosome, nanoparticle, or other delivery vehicle (collectively “delivery vehicles”) may consider the target cell concentration, density of complementary markers on the target cell, whether target cells are associated with other target cells (e.g., in a tumor or a biofilm), target cells' local microenvironment, the binding affinity (K_{d}) of a marker for a complementary marker on the target cell, and the concentration of delivery vehicle. These parameters can be used to arrive at a desired density of molecule-vesicle localization moiety fusion protein or targeting moiety fusion protein (or conjugate)-VLM (or chimeric VLM) fusion protein on the delivery vehicle. The following equation can be used, at least in part, to arrive at the desired amount of marker expressed on the surface of the delivery vehicle: [molecule-vesicle localization moiety fusion]=[target cell][target marker density][K_{d}][delivery vehicle]⁻¹ Eq. I (similarly also for targeting moiety fusion protein (or conjugate)-VLM (or chimeric VLM) fusion protein in place of molecule-vesicle localization moiety fusion)

[0262] The desired amount of molecule-vesicle localization moiety fusion protein on the delivery vehicle can produce 1-100,000 molecule-vesicle localization moiety fusion proteins, or 1-1,000 molecule-vesicle localization moiety fusion proteins, or 1-300 molecule-vesicle localization moiety fusion proteins on the surface of the delivery vehicle. The molecule-vesicle localization moiety fusion proteins can bind to complementary markers with an affinity in the micromolar (μM) range and the desired number of molecule-vesicle localization moiety fusion proteins on the surface delivery vehicle can be 1-10,000, or 50-1,000, or 100-1,000. The molecule-vesicle localization moiety fusion protein can bind to complementary markers with an affinity in the nanomolar (nM) range and the desired number of molecule-vesicle localization moiety fusion proteins on the surface of the delivery vehicle can be 1-1,000, or 1-500, or 1-300, or 10-100. Similarly, also for targeting moiety fusion protein (or conjugate)-VLM (or chimeric VLM) fusion protein in place of molecule-vesicle localization moiety fusion protein.

[0263] The desired number of a molecule-vesicle localization moiety fusion protein on a delivery vehicle can be 2-1,000, 10-1,000, 10-5,000, 10-10,000, 10-50,000, 10-100,000, 10-500,000, or 10-1,000,000. The desired number of a molecule-vesicle localization moiety fusion protein on a delivery vehicle can be 100-1,000, 100-5,000, 100-10,000, 100-50,000, 100-100,000, 100-500,000, 100-1,000,000, 1,000-5,000, 1,000-10,000, 1,000-50,000, 1,000-100,000, 1,000-500,000, 1,000-1,000,000, 10,000-50,000, 10,000-100,000, 10,000-500,000, or 10,000-1,000,000. The desired number of a molecule-vesicle localization moiety fusion protein on a delivery vehicle can be at least 10, 15, 20, 25, 30, 35, 40, 45, 50, 55, 60, 65, 70, 75, 80, 85, 90, 95, 100, 110, 120, 130, 140, 150, 160, 170, 180, 190, 200, 220, 240, 260, 280, 300, 350, 400, 450, 500, 550, 600, 650, 700, 750, 800, 850, 900, 950, 1000, 2000, 3,000, 4,000, 5,000, 6,000, 7,000, 8,000, 9,000, 10,000, 11,000, 12,000, 13,000, 14,000, 15,000, 16,000, 17,000, 18,000, 19,000, 20,000, 21,000, 22,000, 23,000, 24,000, 25,000, 26,000, 27,000, 28,000, 29,000, 30,000, 31,000, 32,000, 33,000, 34,000, 35,000, 36,000, 37,000, 38,000, 39,000, 40,000, 41,000, 42,000, 43,000, 44,000, 45,000, 46,000, 47,000, 48,000, 49,000, 50,000, 51,000, 52,000, 53,000, 54,000, 55,000, 60,000, 65,000, 70,000, 75,000, 80,000, 85,000, 90,000, 95,000 or 100,000. The desired number of a molecule-vesicle localization moiety fusion protein on a delivery vehicle can be fewer than 10, 15, 20, 25, 30, 35, 40, 45, 50, 55, 60, 65, 70, 75, 80, 85, 90, 95, 100, 110, 120, 130, 140, 150, 160, 170, 180, 190, 200, 220, 240, 260, 280, 300, 350, 400, 450, 500, 550, 600, 650, 700, 750, 800, 850, 900, 950, 1000, 2000, 3,000, 4,000, 5,000, 6,000, 7,000, 8,000, 9,000, 10,000, 11,000, 12,000, 13,000, 14,000, 15,000, 16,000, 17,000, 18,000, 19,000, 20,000, 21,000, 22,000, 23.000, 24,000, 25,000, 26.000, 27,000, 28,000, 29,000, 30,000, 31,000, 32,000, 33,000, 34,000, 35,000, 36,000, 37,000, 38,000, 39,000, 40,000, 41,000, 42,000, 43,000, 44,000, 45,000, 46,000, 47,000, 48,000, 49,000, 50,000, 51,000, 52,000, 53,000, 54,000, 55,000, 60,000, 65,000, 70,000, 75,000, 80,000, 85,000, 90,000, 95,000 or 100,000. The desired number of a molecule-vesicle localization moiety fusion protein on a delivery vehicle can be 10, 15, 20, 25, 30, 35, 40, 45, 50, 55, 60, 65, 70, 75, 80, 85, 90, 95, 100, 110, 120, 130, 140, 150, 160, 170, 180, 190, 200, 220, 240, 260, 280, 300, 350, 400, 450, 500, 550, 600, 650, 700, 750, 800, 850, 900, 950, 1000, 2000, 3,000, 4,000, 5,000, 6,000, 7,000, 8,000, 9,000, 10,000, 11,000, 12,000, 13,000, 14,000, 15,000, 16,000, 17,000, 18,000, 19,000, 20,000, 21,000, 22,000, 23,000, 24,000, 25,000, 26,000, 27,000, 28,000, 29,000, 30,000, 31,000, 32,000, 33,000, 34,000, 35,000, 36,000, 37,000, 38,000, 39,000, 40,000, 41,000, 42,000, 43,000, 44,000, 45,000, 46,000, 47,000, 48,000, 49,000, 50,000, 51,000, 52,000, 53,000, 54,000, 55,000, 60,000, 65,000, 70,000, 75,000, 80,000, 85,000, 90,000, 95,000 or 100,000. The delivery vehicle can be an EV or an exosome and the number of molecule-vesicle localization moiety fusion proteins on the surface of the EV or exosome can be 100-100,000. The molecule-vesicle localization moiety fusion protein can bind to a complementary marker on the target with an affinity in the micromolar (μM) range (e.g., 1-500 μM) and the desired number of molecule-vesicle localization moiety fusion proteins on the surface of the delivery vehicle can be 100-100,000. The molecule-vesicle localization moiety fusion protein can bind to a complementary marker on the target with an affinity in the micromolar (μM) range and the desired number of molecule-vesicle localization moiety fusion proteins on the surface of the delivery vehicle can be 100-1,000, 100-5,000, 100-10,000, 100-50,000, 100-100,000, 100-500,000, 100-1,000,000, 1,000-5,000, 1,000-10,000, 1,000-50,000, 1,000-100,000, 1,000-500,000, 1,000-1,000,000, 10,000-50,000, 10,000-100,000, 10,000-500,000, or 10,000-1,000,000. The molecule-vesicle localization moiety fusion protein can bind to a complementary marker on the target with an affinity in the nanomolar (nM) range to sub-nanomolar range and the desired number of molecule-vesicle localization moiety fusion proteins on the surface of the delivery vehicle can be 10-100,000. The molecule-vesicle localization moiety fusion protein can bind to a complementary marker on the target with an affinity in the nanomolar (nM) range (e.g., 1-500 nM) to sub-nanomolar range and the desired number of molecule-vesicle localization moiety fusion protein on the surface of the delivery vehicle can be 100-1,000, 100-5,000, 100-10,000, 100-50,000, 100-100,000, 100-500,000, 100-1,000,000, 1,000-5,000, 1,000-10,000, 1,000-50,000, 1,000-100,000, 1,000-500,000, 1,000-1,000,000, 10,000-50,000, 10,000-100,000, 10,000-500,000, or 10,000-1,000,000. Similarly, also for targeting moiety fusion protein (or conjugate)-VLM (or chimeric VLM) fusion protein in place of molecule-vesicle localization moiety fusion protein.

[0264] The effective (desired) amount of molecule-vesicle localization moiety fusion protein can be an amount which gives a desired amount of area under the curve for a desired activity (e.g., binding to target or target cell killing). The effective amount of molecule-vesicle localization moiety fusion protein can be the amount which gives the maximal amount of area under the curve for a desired activity (e.g., binding to target or target cell killing). The effective amount of molecule-vesicle localization moiety fusion protein can be the amount which gives the optimal amount of area under the curve for a desired activity (e.g., binding to target or target cell killing). The effective amount of molecule-vesicle localization moiety fusion protein can be the amount which gives the desired activity rate maximum (analogous to Cₘₐₓ) for a desired activity (e.g., binding to target or target cell killing). The effective amount of molecule-vesicle localization moiety fusion protein can be the amount which gives the maximal activity rate for a desired activity (e.g., binding to target or target cell killing). The effective amount of molecule-vesicle localization moiety fusion protein can be the amount which gives the optimal activity rate for a desired activity (e.g., binding to target or target cell killing). EV, exosome, nanoparticle, or other delivery vehicle activities that may be customized include, for example, any activities useful in the treatment of disease, including, for example, binding of target, target cell killing, differentiation of target cell, expression of transgene in target cell, etc. Similarly, also for targeting moiety fusion protein (or conjugate)-VLM (or chimeric VLM) fusion protein in place of molecule-vesicle localization moiety fusion protein.

### Kits of the Invention

[0265] According to another aspect of the invention, kits are provided. Kits according to the invention include package(s) comprising any of the compositions of the invention (including the extracellular vesicles of the invention, chimerical vesicle localization moieties, fusion proteins, and nucleic acids).

[0266] The phrase “package” means any vessel containing compositions presented herein. In preferred embodiments, the package can be a box or wrapping. Packaging materials for use in packaging pharmaceutical products are well known to those of skill in the art. Examples of pharmaceutical packaging materials include, but are not limited to, blister packs, bottles, tubes, inhalers, pumps, bags, vials, containers, syringes (including pre-filled syringes), bottles, and any packaging material suitable for a selected formulation and intended mode of administration and treatment.

[0267] The kit can also contain items that are not contained within the package but are attached to the outside of the package, for example, pipettes.

[0268] Kits may optionally contain instructions for administering compositions of the present invention to a subject having a condition in need of treatment. Kits may also comprise instructions for approved uses of components of the composition herein by regulatory agencies, such as the United States Food and Drug Administration. Kits may optionally contain labeling or product inserts for the present compositions. The package(s) and/or any product insert(s) may themselves be approved by regulatory agencies. The kits can include compositions in the solid phase or in a liquid phase (such as buffers provided) in a package. The kits also can include buffers for preparing solutions for conducting the methods, and pipettes for transferring liquids from one container to another.

[0269] The kit may optionally also contain one or more other compositions for use in combination therapies as described herein. In certain embodiments, the package(s) is a container for any of the means for administration such as intratumoral delivery, peritumoral delivery, intraperitoneal delivery, intrathecal delivery, intramuscular injection, subcutaneous injection, intravenous delivery, intra-arterial delivery, intraventricular delivery, intrasternal delivery, intracranial delivery, or intradermal injection.

[0270] The inventions disclosed herein will be better understood from the experimental details which follow. However, one skilled in the art will readily appreciate that the specific methods and results discussed are merely illustrative of the inventions as described more fully in the claims which follow thereafter. Unless otherwise indicated, the disclosure is not limited to specific procedures, materials, or the like, as such may vary. It is also to be understood that the terminology used herein is for the purpose of describing particular embodiments only and is not intended to be limiting.

### EXAMPLES

### Example 1. A Vesicle Localization Moiety with One or More Isopeptide Domain(s) or Isopeptide Tag(s)

[0271] The vesicle localization moiety protein, such as IGSF8, is used in this example. However, any VLM disclosed herein, including chimeric VLM may be used in place of the IGSF8. Further, preferred VLMs are single pass transmembrane proteins, especially type I single pass transmembrane proteins provided in Tables 2 and 3. In a preferred embodiment, chimeric VLMs comprising amino-terminal surface-and-transmembrane domain of a type I single pass transmembrane protein as a VLM followed by cytosolic/lumenal domain of a 2^{nd} type I single pass transmembrane protein as a 2^{nd} VLM is covalently linked as in a fusion protein to one or more isopeptide domain(s) or isopeptide tag(s). The VLM and chimeric VLM can have a signal peptide sequence prior to insertion into lipid bilayer, and following insertion, the signal peptide sequence can be cleaved and lost from the VLM or chimeric VLM. In a preferred embodiment, the fusion protein comprises one or more isopeptide domain(s) or tag(s) upstream of a VLM or chimeric VLM with optionally an amino terminal signal peptide sequence which is cleaved following incorporation of the fusion protein into an EV or exosome. Non-limiting examples of fusion proteins of IGSF8 as a VLM and one or more isopeptide domain(s) or tag(s) follows.

[0272] The extracellular portion of IGSF8 may be fused with an isopeptide domain to make a vesicle localization moiety fusion protein:

(SEQ ID NO: 198)
dykdhdgdykdhdidykddddkGSGDSATHIKFSKRDEDGKELAGATME
LRDSSGKTISTWISDGQVKDFYLYPGKYTFVETAAPDGYEVATAITFTV
NEQGQVTVNGGSPANLKALEAQKQKEQRQAAEELANAKKLKEQLEKREV
LVPEGPLYRVAGTAVSISCNVTGYEGPAQQNFEWFLYRPEAPDTALGIV
STKDTQFSYAVFKSRVVAGEVQVQRLQGDAVVLKIARLQAQDAGIYECH
TPSTDTRYLGSYSGKVELRVLPDVLQVSAAPPGPRGRQAPTSPPRMTVH
EGQELALGCLARTSTQKHTHLAVSFGRSVPEAPVGRSTLQEVVGIRSDL
AVEAGAPYAERLAAGELRLGKEGTDRYRMVVGGAQAGDAGTYHCTAAEW
IQDPDGSWAQIAEKRAVLAHVDVQTLSSQLAVTVGPGERRIGPGEPLEL
LCNVSGALPPAGRHAAYSVGWEMAPAGAPGPGRLVAQLDTEGVGSLGPG
YEGRHIAMEKVASRTYRLRLEAARPGDAGTYRCLAKAYVRGSGTRLREA
ASARSRPLPVHVREEGVVLEAVAWLAGGTVYRGETASLLCNISVRGGPP
GLRLAASWWVERPEDGELSSVPAQLVGGVGQDGVAELGVRPGGGPVSVE
LVGPRSHRLRLHSLGPEDEGVYHCAPSAWVQHADYSWYQAGSARSGPVT
VYPYMHALDTLFVPLLVGTGVALVTGATVLGTITCCFMKRLRKR.

[0273] The sequence in lower case and italicized is an epitope tag. The sequence in bold is the isopeptide domain. The sequences in underline are linkers. The sequence in caps is IGSF8. An alternative IGSF8 vesicle localization moiety-isopeptide domain fusion protein is

(SEQ ID NO: 200)
dykdhdgdykdhdidykddddkGSGGSHMKPERGAVESLQKQHPDYPDI
YGAIDQNGTYQNVRTGEDGKLTFKNLSDGKYRLFENSEPAGYKPVQNKP
IVAFQIVNGEVRDVTSIVPQDIPATYEFTNGKHYITNEPIPPKGSPANL
KALEAQKQKEQRQAAEELANAKKLKEQLEKREVLVPEGPLYRVAGTAVS
ISCNVTGYEGPAQQNFEWFLYRPEAPDTALGIVSTKDTQFSYAVFKSRV
VAGEVQVQRLQGDAVVLKIARLQAQDAGIYECHTPSTDTRYLGSYSGKV
ELRVLPDVLQVSAAPPGPRGRQAPTSPPRMTVHEGQELALGCLARTSTQ
KHTHLAVSFGRSVPEAPVGRSTLQEVVGIRSDLAVEAGAPYAERLAAGE
LRLGKEGTDRYRMVVGGAQAGDAGTYHCTAAEWIQDPDGSWAQIAEKRA
VLAHVDVQTLSSQLAVTVGPGERRIGPGEPLELLCNVSGALPPAGRHAA
YSVGWEMAPAGAPGPGRLVAQLDTEGVGSLGPGYEGRHIAMEKVASRTY
RLRLEAARPGDAGTYRCLAKAYVRGSGTRLREAASARSRPLPVHVREEG
VVLEAVAWLAGGTVYRGETASLLCNISVRGGPPGLRLAASWWVERPEDG
ELSSVPAQLVGGVGQDGVAELGVRPGGGPVSVELVGPRSHRLRLHSLGP
EDEGVYHCAPSAWVQHADYSWYQAGSARSGPVTVYPYMHALDTLFVPLL
VGTGVALVTGATVLGTITCCFMKRLRKR.

[0274] An IGSF8 vesicle localization moiety fusion protein with two isopeptide domains is:

(SEQ ID NO: 202)
dykdhdgdykdhdidykddddkGSGDSATHIKFSKRDEDGKELAGATME
LRDSSGKTISTWISDGQVKDFYLYPGKYTFVETAAPDGYEVATAITFTV
NEQGQVTVNGGGGGSGGGGSGSHMKPLRGAVESLQKQHPDYPDIYGAID
QNGTYQNVRTGEDGKLTFKNLSDGKYRLFENSEPAGYKPVQNKPIVAFQ
IVNGEVRDVTSIVPQDIPATYEFTNGKHYITNEPIPPKGSPANLKALEA
QKQKEQRQAAEELANAKKLKEQLEKREVLVPEGPLYRVAGTAVSISCNV
TGYEGPAQQNFEWFLYRPEAPDTALGIVSTKDTQFSYAVFKSRVVAGEV
QVQRLQGDAVVLKIARLQAQDAGIYECHTPSTDTRYLGSYSGKVELRVL
PDVLQVSAAPPGPRGRQAPTSPPRMTVHEGQELALGCLARTSTQKHTHL
AVSFGRSVPEAPVGRSTLQEVVGIRSDLAVEAGAPYAERLAAGELRLGK
EGTDRYRMVVGGAQAGDAGTYHCTAAEWIQDPDGSWAQIAEKRAVLAHV
DVQTLSSQLAVTVGPGERRIGPGEPLELLCNVSGALPPAGRHAAYSVGW
EMAPAGAPGPGRLVAQLDTEGVGSLGPGYEGRHIAMEKVASRTYRLRLE
AARPGDAGTYRCLAKAYVRGSGTRLREAASARSRPLPVHVREEGVVLEA
VAWLAGGTVYRGETASLLCNISVRGGPPGLRLAASWWVERPEDGELSSV
PAQLVGGVGQDGVAELGVRPGGGPVSVELVGPRSHRLRLHSLGPEDEGV
YHCAPSAWVQHADYSWYQAGSARSGPVTVYPYMHALDTLFVPLLVGTGV
ALVTGATVLGTITCCFMKRLRKR.

[0275] An IGSF8 vesicle localization moiety fusion protein with three isopeptide domains is:

(SEQ ID NO: 204)
dykdhdgdykdhdidykddddkSSGLVPRGSHMASMTGGQQMGRGSSGL
SGETGQSGNTTIEEDSTTHVKFSKRDANGKELAGAMIELRNLSGQTIQS
WISDGTVKVFYLMPGTYQFVETAAPEGYELAAPITFTIDEKGQIWVDSA
MVDTLSGLSSEQGQSGDDSATHIKFSKRDEDGKELAGATMELRDSSGKT
ISTWISDGQVKDFYLYPGKYTFVETAAPDGYEVATAITFTVNEQGQVTV
NGGGGGSGGGGSGSHMKPLRGAVFSLQKQHPDYPDIYGAIDQNGTYQNV
RTGEDGKLTFKNLSDGKYRLFENSEPAGYKPVQNKPIVAFQIVNGEVRD
VTSIVPQDIPATYEFTNGKHYITNEPIPPKGSPANLKALEAQKQKEQRQ
AAEELANAKKLKEQLEKREVLVPEGPLYRVAGTAVSISCNVTGYEGPAQ
QNFEWFLYRPEAPDTALGIVSTKDTQFSYAVFKSRVVAGEVQVQRLQGD
AVVLKIARLQAQDAGIYECHTPSTDTRYLGSYSGKVELRVLPDVLQVSA
APPGPRGRQAPTSPPRMTVHEGQELALGCLARTSTQKHTHLAVSFGRSV
PEAPVGRSTLQEVVGIRSDLAVEAGAPYAERLAAGELRLGKEGTDRYRM
VVGGAQAGDAGTYHCTAAEWIQDPDGSWAQIAEKRAVLAHVDVQTLSSQ
LAVTVGPGERRIGPGEPLELLCNVSGALPPAGRHAAYSVGWEMAPAGAP
GPGRLVAQLDTEGVGSLGPGYEGRHIAMEKVASRTYRLRLEAARPGDAG
TYRCLAKAYVRGSGTRLREAASARSRPLPVHVREEGVVLEAVAWLAGGT
VYRGETASLLCNISVRGGPPGLRLAASWWVERPEDGELSSVPAQLVGGV
GQDGVAELGVRPGGGPVSVELVGPRSHRLRLHSLGPEDEGVYHCAPSAW
VQHADYSWYQAGSARSGPVTVYPYMHALDTLFVPLLVGTGVALVTGATV
LGTITCCFMKRLRKR.

[0276] The extracellular portion of IGSF8 may be fused with an isopeptide tag to make a vesicle localization moiety fusion protein:

Isopeptide-1 Tag-IGSF8
(SEQ ID NO: 216)
DykdhdgdykdhdidykddddkGSGAHIVMVDAYKPTKGSPANLKALEA
QKQKEQRQAAEELANAKKLKEQLEKREVLVPEGPLYRVAGTAVSISCNV
TGYEGPAQQNFEWFLYRPEAPDTALGIVSTKDTQFSYAVFKSRVVAGEV
QVQRLQGDAVVLKIARLQAQDAGIYECHTPSTDTRYLGSYSGKVELRVL
PDVLQVSAAPPGPRGRQAPTSPPRMTVHEGQELALGCLARTSTQKHTHL
AVSFGRSVPEAPVGRSTLQEVVGIRSDLAVEAGAPYAERLAAGELRLGK
EGTDRYRMVVGGAQAGDAGTYHCTAAEWIQDPDGSWAQIAEKRAVLAHV
DVQTLSSQLAVTVGPGERRIGPGEPLELLCNVSGALPPAGRHAAYSVGW
EMAPAGAPGPGRLVAQLDTEGVGSLGPGYEGRHIAMEKVASRTYRLRLE
AARPGDAGTYRCLAKAYVRGSGTRLREAASARSRPLPVHVREEGVVLEA
VAWLAGGTVYRGETASLLCNISVRGGPPGLRLAASWWVERPEDGELSSV
PAQLVGGVGQDGVAELGVRPGGGPVSVELVGPRSHRLRLHSLGPEDEGV
YHCAPSAWVQHADYSWYQAGSARSGPVTVYPYMHALDTLEVPLLVGTGV
ALVTGATVLGTITCCFMKRLRKR.

[0277] The sequence in lower case and italicized is an epitope tag. The sequence in bold is the isopeptide tag. The sequences in underline are linkers. The sequence in caps is IGSF8. An alternative IGSF8 vesicle localization moiety-isopeptide domain fusion protein is:

Isopeptide-2 Tag-IGSF8
(SEQ ID NO: 218)
DykdhdgdykdhdidykddddkGSGKLGDIEFIKVNKGSPANLKALEAQ
KQKEQRQAAEELANAKKLKEQLEKREVLVPEGPLYRVAGTAVSISCNVT
GYEGPAQQNFEWFLYRPEAPDTALGIVSTKDTQFSYAVFKSRVVAGEVQ
VQRLQGDAVVLKIARLQAQDAGIYECHTPSTDTRYLGSYSGKVELRVLP
DVLQVSAAPPGPRGRQAPTSPPRMTVHEGQELALGCLARTSTQKHTHLA
VSFGRSVPEAPVGRSTLQEVVGIRSDLAVEAGAPYAERLAAGELRLGKE
GTDRYRMVVGGAQAGDAGTYHCTAAEWIQDPDGSWAQIAEKRAVLAHVD
VQTLSSQLAVTVGPGERRIGPGEPLELLCNVSGALPPAGRHAAYSVGWE
MAPAGAPGPGRLVAQLDTEGVGSLGPGYEGRHIAMEKVASRTYRLRLEA
ARPGDAGTYRCLAKAYVRGSGTRLREAASARSRPLPVHVREEGVVLEAV
AWLAGGTVYRGETASLLCNISVRGGPPGLRLAASWWVERPEDGELSSVP
AQLVGGVGQDGVAELGVRPGGGPVSVELVGPRSHRLRLHSLGPEDEGVY
HCAPSAWVQHADYSWYQAGSARSGPVTVYPYMHALDTLFVPLLVGTGVA
LVTGATVLGTITCCFMKRLRKR.

[0278] An IGSF8 vesicle localization moiety fusion protein with two isopeptide tags is:

Isopeptide-1_Isopeptide-2 Tags-IGSF8
(SEQ ID NO: 220)
DykdhdgdykdhdidykddddkGSGAHIVMVDAYKPTKGGGGSGGGGSK
LGDIEFIKVNKGSPANLKALEAQKQKEQRQAAEELANAKKLKEQLEKRE
VLVPEGPLYRVAGTAVSISCNVTGYEGPAQQNFEWFLYRPEAPDTALGI
VSTKDTQFSYAVFKSRVVAGEVQVQRLQGDAVVLKIARLQAQDAGIYEC
HTPSTDTRYLGSYSGKVELRVLPDVLQVSAAPPGPRGRQAPTSPPRMTV
HEGQELALGCLARTSTQKHTHLAVSFGRSVPEAPVGRSTLQEVVGIRSD
LAVEAGAPYAERLAAGELRLQKEGTDRYRMVVGGAQAGDAGTYHCTAAE
WIQDPDGSWAQIAEKRAVLAHVDVQTLSSQLAVTVGPGERRIGPGEPLE
LLCNVSGALPPAGRHAAYSVGWEMAPAGAPGPGRLVAQLDTEGVGSLGP
GYEGRHIAMEKVASRTYRLRLEAARPGDAGTYRCLAKAYVRGSGTRLRE
AASARSRPLPVHVREEGVVLEAVAWLAGGTVYRGETASLLCNISVRGGP
PGLRLAASWWVERPEDGELSSVPAQLVGGVGQDGVAELGVRPGGGPVSV
ELVGPRSHRLRLHSLGPEDEGVYHCAPSAWVQHADYSWYQAGSARSGPV
TVYPYMHALDTLFVPLLVGTGVALVTGATVLGTITCCFMKRLRKR.

[0279] An IGSF8 vesicle localization moiety fusion protein with three isopeptide tags is:

Isopeptide-1_Isopeptide-2_Isopeptide-3 Tags-IGSF8
(SEQ ID NO: 222)
DykdhdgdykdhdidykddddkDPIVMIDNDKPITAMVDTLSGLSSEOGQSGDAHI
VMVDAYKPTKGGGGSGGGGSKLGDIEFIKVNKGSPANLKALEAQKQKEQRQAAEEL
ANAKKLKEQLEKREVLVPEGPLYRVAGTAVSISCNVTGYEGPAQQNFEWFLYRPEAPD
TALGIVSTKDTQFSYAVFKSRVVAGEVQVQRLQGDAVVLKIARLQAQDAGIYECHTPST
DTRYLGSYSGKVELRVLPDVLQVSAAPPGPRGRQAPTSPPRMTVHEGQELALGCLARTS
TQKHTHLAVSFGRSVPEAPVGRSTLQEVVGIRSDLAVEAGAPYAERLAAGELRLGKEGT
DRYRMVVGGAQAGDAGTYHCTAAEWIQDPDGSWAQIAEKRAVLAHVDVQTLSSQLA
VTVGPGERRIGPGEPLELLCNVSGALPPAGRHAAYSVGWEMAPAGAPGPGRLVAQLDT
EGVGSLGPGYEGRHIAMEKVASRTYRLRLEAARPGDAGTYRCLAKAYVRGSGTRLREA
ASARSRPLPVHVREEGVVLEAVAWLAGGTVYRGETASLLCNISVRGGPPGLRLAASWW
VERPEDGELSSVPAQLVGGVGQDGVAELGVRPGGGPVSVELVGPRSHRLRLHSLGPEDE
GVYHCAPSAWVQHADYSWYQAGSARSGPVTVYPYMHALDTLFVPLLVGTGVALVTG
ATVLGTITCCFMKRLRKR.

### Affinity Peptides as Targeting Moieties Fused to Isopeptide Tags or Isopeptide Domains:

[0280] In the following examples, the sequences in bold signify an affinity peptide THVSPNQGGLPS (SEQ ID NO: 196), also called PEPN, directed to glypican-3 (GPC3) cell surface protein. Other affinity peptides as targeting moieties may be used in place of the GPC3 affinity peptide; non-limiting examples of other affinity peptides include THRPPMWSPVWP (SEQ ID NO.: 194) and those in Table 6 (SEQ ID NO: 157-192). The sequences that are both bold and underlined signify an isopeptide tag or isopeptide domain. The sequences that are underlined signify a linker. Further, sequences that are in lowercase signify an epitope sequence.

Isopeptide(1) tag-GPC3 affinity peptide fusion
protein
(SEQ ID NO: 238)
AHIVMVDAYKPTKSGGGGSGGGGketaaakferqhmdsTHVSPNQGGL
PS.
(SEQ ID NO: 236)
THVSPNQGGLPSSGGGGSGGGGketaaakferqhmdsAHIVMYDAYKP
TK.
Isopeptide(2) tag-GPC3 affinity peptide fusion
protein
(SEQ ID NO: 240)
THVSPNQGGLPSSGGGGSGGGGeqkliseedlKLGDIEFIKVNK.
(SEQ ID NO: 242)
KLGDIEFIKVNKSGGGGSGGGGeqkliseedlTHVSPNQGGLPS.
Isopeptide(3) tag-GPC3 affinity peptide fusion
protein
(SEQ ID NO: 244)
THVSPNQGGLPSSGGGGSGGGGgkpipnpllgldstDPIVMIDNDKPI
T.
(SEQ ID NO: 246)
DPIVMIDNDKPITSGGGGSGGGGgkpipnpllgldstTHVSPNQGGLP
S.

### Affinity Peptides for GPC3 Cell Surface Receptor Fused to Isopeptide Domains:

(SEQ ID NO: 256)
DSATHIKFSKRDEDGKELAGATMELRDSSGKTISTWISDGQVKDFYLYPGKYTFVE
TAAPDGYEVATAITFTVNEQGQVTVNGSGGGGSGGGGketaaakferqhmdsTHVSPNQGG
LPS.
(SEQ ID NO: 254)
THVSPNQGGLPSSGGGGSGGGGketaaakferqhmdsDSATHIKFSKRDEDGKELAGATME
LRDSSGKTISTWISDGQVKDFYLYPGKYTFVETAAPDGYEVATAITFTYNEQGQVT
VNG.
(SEQ ID NO: 258)
THVSPNQGGLPSSGGGGSGGGGeqkliseedlGSHMKPLRGAVFSLQKQHPDYPDIYGAI
DQNGTYQNVRTGEDGKLTFKNLSDGKYRLFENSEPAGYKPVQNKPIVAFQIVNGE
VRDVTSIVPQDIPATYEFTNGKHYITNEPIPPK.
(SEQ ID NO: 260)
GSHMKPLRGAVESLQKQHPDYPDIYGAIDQNGTYQNVRTGEDGKLTFKNLSDGKY
RLFENSEPAGYKPVQNKPIVAFQIVNGEVRDVTSIVPQDIPATYEFTNGKHYITNEPI
PPKSGGGGSGGGGeqkliseedlTHVSPNQGGLPS.
(SEQ ID NO: 262)
THVSPNQGGLPSSGGGGSGGGGgkpipnpllgldstSSGLVPRGSHMASMTGGQQMGRGSS
GLSGETGQSGNTTIEEDSTTHVKFSKRDANGKELAGAMIELRNLSGQTIQSWISDG
TVKVFYLMPGTYQFVETAAPEGYELAAPITFTIDEKGQIWVDS.
(SEQ ID NO: 264)
SSGLVPRGSHMASMTGGQQMGRGSSGLSGETGQSGNTTIEEDSTTHVKFSKRDAN
GKELAGAMIELRNLSGQTIQSWISDGTVKVFYLMPGTYQFVETAAPEGYELAAPIT
FTIDEKGQIWVDSSGGGGSGGGGgkpipnpllgldstTHVSPNQGGLPS.

Single Chain Fv (scFv) as a Targeting Moiety Fused to Isopeptide Tags:

[0282] GC33, a single chain antibody that binds to GPC3 is also used as the molecule for the isopeptide tag. GPC3 is a cell surface proteoglycan that bears heparan sulfate that negatively regulates the hedgehog signaling pathway when attached via the GPI-anchor to the cell surface by competing with the hedgehog receptor PTC1 for binding to hedgehog proteins. GPC3 positively regulates the canonical Wnt signaling pathway by binding to the Wnt receptor Frizzled and stimulating the binding of the Frizzled receptor to Wnt ligands. Binds to CD81 which decreases the availability of free CD81 for binding to the transcriptional repressor HHEX, resulting in nuclear translocation of HHEX and transcriptional repression. Plays a role in limb patterning and skeletal development by controlling the cellular response to BMP4. Modulates the effects of growth factors BMP2, BMP7 and FGF7 on renal branching morphogenesis. Required for coronary vascular development. Non-limiting examples of fusion proteins of GC33 scFv as a targeting moiety and one or more isopeptide domain(s) or tag(s) follows.

[0283] GC33 scFv may be fused with an isopeptide tag to make a targeting moiety (to target GPC3 cell surface receptor on GPC3 expressing cells)-isopeptide tag fusion protein:

scFv-linker-epitope sequence-isopeptide(1) tag
(SEQ ID NO: 230)
QVQLVQSGAEVKKPGASVKVSCKASGYTFTDYEMHWVRQAPGQGLEWMGALDPKTG
DTAYSQKFKGRVTLTADKSTSTAYMELSSLTSEDTAVYYCTRFYSYTYWGQGTLVTVS
SSSGGSSRSSSSGGGGSGGGGDVVMTQSPLSLPVTPGEPASISCRSSQSLVHSNGNTYLH
WYLQKPGQSPQLLIYKVSNRFSGVPDRFSGSGSGTDFTLKISRVEAEDVGVYYCSQNTH
VPPTFGQGTKLEIKSGGGGGGGGketaaakferqhmdsAHIVMYDAYKPTK

[0284] The sequences in uppercase letters signify GC33 single chain Fv (scFv) as an antibody fragment and targeting moiety directed to glypican-3 (GPC3) cell surface protein. The sequences that are both bold and underlined signify an isopeptide tag with the amino acid participating in isopeptide bond formation in bold, underline and italics. The sequences that are underlined signify a linker. Further, sequences that are in lowercase signify an epitope sequence. Alternative targeting moiety (e.g., GC33 scFv)-isopeptide tag fusion proteins and their sequences are:

scFV-linker-epitope sequence-isopeptide(2) tag
(SEQ ID NO: 232)
QVQLVQSGAEVKKPGASVKVSCKASGYTFTDYEMHWVRQAPGQGLEWMGALDPKTG
DTAYSQKFKGRVTLTADKSTSTAYMELSSLTSEDTAVYYCTRFYSYTYWGQGTLVTVS
SSSGGSSRSSSSGGGGSGGGGDVVMTQSPLSLPVTPGEPASISCRSSQSLVHSNGNTYLH
WYLQKPGQSPQLLIYKVSNRFSGVPDRFSGSGSGTDFTLKISRVEAEDVGVYYCSQNTH
VPPTFGQGTKLEIKSGGGGSGGGGeqkliseedlKLGDIEFIKYNK
scFV-linker-epitope sequence-isopeptide(3) tag
(SEQ ID NO: 234)
QVQLVQSGAEVKKPGASYKVSCKASGYTFTDYEMHWVRQAPGQGLEWMGALDPKTGDTAY
SQKFKGRVTLTADKSTSTAYMELSSLTSEDTAVYYCTRFYSYTYWGQGTLVTVSSSSGGSSRSSS
SGGGGSGGGGDFFMTQSPLSLPVTPGEPASISCRSSQSLVHSNGNTYLHWYLQKPGQSPQLLI
YKYSNRFSGVPDRFSGSGSGTDFTLKISRVEAEDVGVYYCSQNTHVPPTFGQGTKLEIKSGGG
GSGGGGgkpipnpllgldstDPIVMIDNDKPIT.

### Additional Examples of Affinity Peptide Fused to Isopeptide Domains Either at N-Terminus or C-Terminus in Fusion Proteins:

[0285] Additional examples of an affinity peptide THVSPNQGGLPS (SEQ ID NO: 196) joined to isopeptide domains are as follows. The sequences that are in bold signify the affinity peptide. The sequences that are underlined signify a linker. The sequences that are in italics signify isopeptide-1, -2, -3 domains. The sequences in lowercase signify epitope sequences.

Affinity peptide + isopeptide domain (isopeptide-1)
N-terminal affinity peptide:
(SEQ ID NO: 254)
THVSPNQGGLPSSGGGGSGGGGketaaakferqhmdsDSATHIKFSKRDEDGKELAGATMELRD
SSGKTISTWISDGQVKDFYLYPGKYTFVETAAPDGYEVATAITFTVNEQGQVTVNG (S-tag)
C-terminal affinity peptide:
(SEQ ID NO: 256)
DSATHIKFSKRDEDGKELAGATMELRDSSGKTISTWISDGQVKDFYLYPGKYTFVETAAPDGY
EVATAITFTVNEQGQVTVNGSGGGGSGGGGketaaakferqhmdsTHVSPNQGGLPS (S-tag)
Affinity peptide + isopeptide domain (isopeptide-2)
N-terminal affinity peptide:
(SEQ ID NO: 258)
THVSPNQGGLPSSGGGGSGGGGeqkliseedIGSHMKPLRGAVESLQKQHPDYPDIYGAIDQ
NGTYQNVRTGEDGKLTFKNLSDGKYRLFENSEPAGYKPVQNKPIVAFQIVNGEVRDVTS
IVPQDIPATYEFTNGKHYITNEPIPPK
C-terminal affinity peptide:
(SEQ ID NO: 260)
GSHMKPLRGAVFSLQKQHPDYPDIYGAIDQNGTYQNVRTGEDGKLTFKNLSDGKYRLF
ENSEPAGYKPVQNKPIVAFQIVNGEVRDVTSIVPQDIPATYEFTNGKHYITNEPIPPKSGG
GGSGGGGeqkliseedlTHVSPNQGGLPS
Affinity peptide + isopeptide domain (isopeptide-3)
N-terminal affinity peptide:
(SEQ ID NO: 262)
THVSPNQGGLPSSGGGGSGGGGgkpipnpllgldstSSGLVPRGSHMASMTGGQQMGRGSSG
LSGETGQSGNTTIEEDSTTHVKFSKRDANGKELAGAMIELRNLSGQTIQSWISDGTVKVF
YLMPGTYQFVETAAPEGYELAAPITFTIDEKGQIWVDS
C-terminal affinity peptide:
(SEQ ID NO: 264)
SSGLVPRGSHMASMTGGQQMGRGSSGLSGETGQSGNTTIEEDSTTHVKFSKRDANGKE
LAGAMIELRNLSGQTIQSWISDGTVKVFYLMPGTYQFVETAAPEGYELAAPITFTIDEKG
QIWVDSSGGGGSGGGGgkpipnpllgldstTHVSPNQGGLPS

### Example 2. Making EVs with IGSF8 Vesicle Localization Moiety Fusion Protein

[0286] Constructs encoding IGSF8-isopeptide domain fusions of SEQ ID NO: 198, 200, 202 and 204 are made so as to express IGSF8-isopeptide domain fusion of SEQ ID NO: 197, 199, 201 and 203 corresponding to Isopeptide(1) domain-IGSF8 VLM, Isopeptide(2) domain-IGSF8 VLM, Isopeptide(1)+Isopeptide(2) domains-IGSF8 VLM (a DiCatcher-IGSF8) and Isopeptide(3)+Isopeptide(1)+Isopeptide(2) domains-IGSF8 VLM fusion proteins, respectively. The transgene encoding IGSF8-isopeptide domain fusion protein is translated by producer cell machinery into a single-pass transmembrane protein with a 13 amino acid cytosolic (lumenal) domain at the C-terminus. The surface domain contains 552 amino acids fused to a synthetic, recombinant N-terminal domain containing one or more isopeptide domains joined to IGSF8 and, in the case of a multi-isopeptide domain arrangement, to each other via a flexible linker sequence that encodes no secondary structural elements. The synthetic N-terminal domain also contains a 3× Flag epitope for detection in both western blot and flow cytometry applications.

[0287] The IGSF8-isopeptide domain fusion protein transgene is synthesized de novo and spliced into a plasmid containing the appropriate sequences for mammalian expression (promoter, terminator, origin of replication, etc.). The plasmid is then transfected into producer cells using a liposome-based transfection reagent to produce the IGSF8-isopeptide domain fusion protein. The nascent fusion protein can comprise a signal peptide at the amino-terminus of the IGSF8-isopeptide domain fusion protein, which is cleaved from the fusion protein following association with cellular membrane, so that the mature or processed fusion protein lacks an amino-terminal signal peptide present initially in the nascent fusion protein. Sequence elements encoded in the primary amino acid sequence of IGSF8 are recognized by producer cell membrane trafficking factors that sort the IGSF8 transgene protein product into exosome biogenesis sites. Exosomes budding from these membrane domains then incorporate the IGSF8 fusion protein.

[0288] After intracellular IGSF8 construct expression levels have peaked following transfection, EVs produced from these cells are separated from cells and cellular debris through differential centrifugation. The supernatant from these centrifugation steps is concentrated and buffer exchanged into PBS. The EVs contained in the PBS are then passed through size exclusion chromatography resin to remove unassociated proteins. The EVs are then sterile filtered through a 0.22 μm filter.

[0289] IGSF8-containing EVs are detected by vesicle flow cytometry. To ensure that EVs are displaying the construct encoded by the transfected plasmid, and that it is oriented in the correct transmembrane topology, isolated EVs are stained with fluorophore-conjugated anti-epitope tag (e.g., Flag) antibody and a membrane stain. The stained vesicles are evaluated using vesicle flow cytometry (Cytoflex—Beckman Coulter). EVs are identified as membrane stain-positive particles. The amount of recombinant protein on each EV is detected using an fluorophore-conjugated antibody that binds specifically to the epitope sequence included in the primary sequence of the protein, and would only be available on the EV surface if the protein were oriented in the intended topology (C-terminal domain in the lumen; N-terminal domain on the EV surface). The amount of recombinant protein on each evaluated EV is determined by the antibody signal/membrane-stained particle. The presence of coincident membrane stain and antibody-specific fluorescence indicates the presence of the IGSF8 fusion protein, oriented appropriately on the EV surface.

[0290] FIG. 5 shows expression characteristics of isopeptide domain fusion proteins in EVs. Plasmids encoding the indicated recombinant proteins (also see FIGS. 1-4 for expression plasmid and structure of the fusion proteins) were transiently transfected into producer cells using standard methods. 5 days post transfection, conditioned media was harvested from the producer cells. EVs were concentrated and purified using in-house methods. A fluorophore-conjugated Flag antibody was used to detect the presence of a Flag epitope tag—specifically encoded by the recombinant isopeptide fusion proteins expressed in this experiment—on purified, membrane-stained EVs, using flow cytometry. The dark gray columns correspond to the left vertical axis and reflect the percentage of analyzed EVs incorporating detectable levels of recombinant fusion protein. The light gray columns correspond to the right vertical axis and reflect the median fluorescent intensity—specific to the Flag antibody-conjugated fluorophore—of EVs incorporating detectable levels of recombinant protein. Comparison with bead-based standard curves suggests that these values (light gray bars) approximate the median number of recombinant proteins incorporated per EV.

### Example 3. Isopeptide Bond Formation Between Isopeptide Domain and Isopeptide Tag to Produce EVs Displaying Targeting Moiety(ies), Such as Affinity Peptide(s) or scFv(s), on their External Surface

[0291] EVs incorporating IGSF8-isopeptide domain fusion proteins are mixed with freely soluble targeting moieties fused to an isopeptide tag. Targeting moieties, GC33 scFv and affinity peptide THVSPNQGGLPS (SEQ ID NO: 196), target [symbol] hepatocellular carcinoma (HCC)-specific cell surface protein GPC3. Fusions of these proteins with an isopeptide tag are described in Example 1. The EVs with IGSF8 fusions (from Example I) are mixed with either GC33 scFv with an isopeptide tag or an affinity peptide with and isopeptide tag, for example Vesicle Localization Moiety Fusion Protein SEQ ID NO: 198 and Molecule Tag SEQ ID NO: 238; Vesicle Localization Moiety Fusion SEQ ID NO: 218 and Molecule Tag SEQ ID NO: 248; Chimeric VLM Fusion SEQ ID NO: 212 and Molecule Tag SEQ ID NO: 224; Chimeric VLM Fusion SEQ ID NO: 214 and Molecule Tag SEQ ID NO: 234; and Chimeric VLM Fusion SEQ ID NO: 214 and 2 different Molecule Tags SEQ ID NO: 234 and SEQ ID NO: 236.

[0292] In general, EV concentration is approximately 1E10 to 3E11 EVs/mL and isopeptide-targeting moiety fusion protein concentration is 0.02 to 100 μM in 1×PBS buffer. Following incubation at RT to permit binding of the isopeptide tag by the isopeptide domain and subsequent (spontaneous) formation of an isopeptide bond, the EVs along with unreacted isopeptide tag-targeting moiety fusion peptide or protein may be directly analyzed, or alternatively, are purified from unreacted isopeptide tag-targeting moiety fusion protein or peptide by Amicon® Centrifugal Filter Units (100 kDa cut-off), concentrated and buffer exchanged into PBS. EVs are then filtered using Capto™ Core700 (Cytiva) Size Exclusion Chromatography (SEC) resin to remove non-EV-associated protein. Finally, the EVs are sterile filtered, using a 0.22 μm centrifugal filter column unit.

[0293] The ability of the IGSF8 fusion protein to bind to GC33 scFv and an affinity peptide with isopeptide tags is assessed by vesicle flow cytometry (vFC) and western blot. In the case of bivalent and trivalent vesicle localization moiety constructs (e.g., vesicle localization moiety fusion proteins comprising 2 or 3 isopeptide domains) such as SEQ ID NO: 206 and 204, targeting moieties with appropriate isopeptide tags (e.g., SEQ ID NO: 236, 240, and 244) are combined and mixed with isolated EVs modified with IGSF8-multi-isopeptide domain vesicle localization moiety fusion proteins in 1×PBS or a buffer solution which supports isopeptide bond formation. Following removal of unligated targeting moieties (i.e., targeting moieties which are attached to isopeptide domains), multivalent modification of individual IGSF8-isopeptide domain vesicle localization moieties are verified by both vFC, immunoprecipitation and western blot. Individual targeting moiety and associated isopeptide-tag conjugate or fusion protein will incorporate unique epitope sequences (for convenience, in lieu of the epitope sequences V5, Myc and S-tag (S-peptide epitope tag) were sometimes used), which will facilitate verification of coincident covalent modification of individual IGSF8-isopeptide domain fusion proteins with up to three different targeting moieties.

### Example 4: Delivery to Target Cells by EVs with Targeting Moiety Fusion Protein Covalently Linked to an IGSF8 Vesicle Localization Moiety Fusion Protein Through an Isopeptide Bond

[0294] The affinity of EVs engineered with IGSF8 vesicle localization moiety fusions and a targeting moiety with affinity for GPC3 (the affinity peptide THVSPNQGGLPS (SEQ ID NO: 196; also called PEPN) or GC33 scFv) for the cell surface transmembrane protein GPC3 is measured. HepG2 cells expressing the target surface protein are mixed with PC3 cells that do not express the target protein to create a co-culture system. EVs with THVSPNQGGLPS-IGSF8 fusion or GC33 scFv-IGSF8 are made as describe in Example 3, and labeled with membrane stain. These engineered and labeled EVs are added to HepG2-PC3 cocultures. Binding and uptake of EVs into HepG2 cells versus PC3 cells is assessed by flow cytometry to discern the level of EV-associated fluorescence that becomes incorporated into each cell type in the co-culture.

[0295] EVs with the THVSPNQGGLPS-IGSF8 fusion or GC33 scFv-IGSF8 show preferential uptake into HepG2 cells.

### Example 5: In Vivo Biodistribution and Efficacy

[0296] EVs with THVSPNQGGLPS-IGSF8 fusion or GC33 scFv-IGSF8 fusion are made as described in Example 3, and labeled with DiR (DiIC18(7); 1,1′-dioctadecyl-3,3,3′,3′-tetramethylindotricarbocyanine iodide), fluorophores or radioactive isotopes. These engineered and labeled EVs are added to wild type (WT) mice. As a negative control, EVs with IGSF8-isopeptide domain, but conjugated to random peptide sequences are used. Delivery by the engineered EVs to the kidneys of the mice is assessed by differential detection of labeled EV enrichment in the target organ or tissue by assessing signal/gram of tissue.

### Example 6: Delivery of EVs to Tumor Cells In Vivo

[0297] EVs with affinity peptide-IGSF8 fusion or GC33 scFv-IGSF8 fusion are made as describe in Example 3, and a small molecule drug is loaded into the EVs as a payload. Drug is loaded into the EV by incubating concentrated EVs with drug. Sonication transiently permeabilizes the EV membrane allowing drug to equilibrate between the EV lumen and surrounding solution. Drug loading is validated by washing weakly associated drug from the EVs through several buffer exchange steps followed by solubilizing the EV membrane and assessing the released chemical entities by High Performance Liquid Chromatography (HPLC) to confirm the presence of drug.

[0298] The mouse-tumor xenograft model HepG2 is used. NOD.Cg-Prkdcscid Il2rgtm1Wjl/SzJ immune compromised mice are inoculated with 2 million HepG2 xenograft cells (liver cancer) and tumors are allowed to form. Mice are administered EVs carrying the small molecule payload doxorubicin. The tumors in mice receiving the Evs carrying the payload and the affinity peptide-IGSF8 fusion or GC33 scFv-IGSF8 fusion are assayed and examined to determine whether there is inhibition of the tumors in the mice.

### Example 7: Synthesis of Nucleic Acid-Isopeptide Tag Conjugate

[0299] Peptide-ASO conjugates, Nterm-AHIVMVDAYKPTK-Cterm-Cys-5′-[TGC GCT CCT GGA CGT AGC C /Cy3/]-3′ (molecular weight: 8747.1; and 1.8 mg yield with 81.9% purity as determined by HPLC; also called 5′-IsoPepTag1-ASO) and 5′-[/Cy3/-TGC GCT CCT GGA CGT AGC C]-3′-Cys-Nterm-AHIVMVDAYKPTK-Cterm (molecular weight: 8641.07; and 1.5 mg yield with 93.9% purity as determined by HPLC; also called 3′-IsoPepTag1-ASO), were synthesized via click chemistry. The purified peptide-ASO conjugates are lyophilized and stored at −70° C. until use.

### Example 8: Preparing EVs with Tricatcher-1 Fusion Protein and Control EVs

[0300] HEK293F cells are transfected with an expression plasmid for a fusion protein comprising three isopeptide domains and an IGSF8 VLM, which additionally comprises a signal peptide at the N-terminus so as to permit association of the newly synthesized fusion protein with cellular membrane and sorting to endosomes. 24 hours after transfection, the transfection media was exchanged for fresh media (exosome depleted media or chemically defined media), and the cells were grown for an additional 96 hours. 96 hours following media exchange, the cultures were transferred into 50-mL conical tubes and centrifuged at 3,220×g for 30 min. The supernatant from these cultures were transferred to Amicon® Centrifugal Filter Units (100 kDa cut-off), concentrated and buffer exchanged into PBS. EVs are then filtered using Capto™ Core700 (Cytiva) Size Exclusion Chromatography (SEC) resin to remove non-EV-associated protein. Finally, the EVs are sterile filtered, using a 0.22 μm centrifugal filter column unit.

[0301] Isolated EVs are analyzed for the presence of exosomes displaying the Isopeptide-1_Isopeptide-2_Isopeptide-3 Tags-IGSF8 fusion protein (also called “Tricatcher-1-IGSF8 fusion protein) lacking the N-terminal signal peptide sequence cleaved off during EV biogenesis.

Isopeptide-1_Isopeptide-2_Isopeptide-3-IGSFS (also called “Tricatcher-1-
IGSF8 fusion protein”)
(SEQ ID NO: 204)
dykdhdgdykdhdidykddddkSSGLVPRGSHMASMTGGQQMGRGSSGLSGET
GQSGNTTIEEDSTTHVKFSKRDANGKELAGAMIELRNLSGQTIQSWISDGTVKVFY
LMPGTYQFVETAAPEGYELAAPITFTIDEKGQIWVDSAMVDTLSGLSSEQGQSGDDS
ATHIKESKRDEDGKELAGATMELRDSSGKTISTWISDGQVKDFYLYPGKYTFVETA
APDGYEVATAITFTVNEQGQVTVNGGGGGSGGGGSGSHMKPLRGAVFSLQKQHPD
YPDIYGAIDONGTYQNVRTGEDGKLTFKNLSDGKYRLFENSEPAGYKPVQNKPIVA
FQIVNGEVRDVTSIVPQDIPATYEFTNGKHYITNEPIPPKGSPANLKALEAQKQKEQR
QAAEELANAKKLKEQLEKREVLVPEGPLYRVAGTAVSISCNVTGYEGPAQQNFEWFLY
RPEAPDTALGIVSTKDTQFSYAVFKSRVVAGEVQVQRLQGDAVVLKIARLQAQDAGIYE
CHTPSTDTRYLGSYSGKVELRVLPDVLQVSAAPPGPRGRQAPTSPPRMTVHEGQELALG
CLARTSTQKHTHLAVSFGRSVPEAPVGRSTLQEVVGIRSDLAVEAGAPYAERLAAGELR
LGKEGTDRYRMVVGGAQAGDAGTYHCTAAEWIQDPDGSWAQIAEKRAVLAHVDVQT
LSSQLAVTVGPGERRIGPGEPLELLCNVSGALPPAGRHAAYSVGWEMAPAGAPGPGRL
VAQLDTEGVGSLGPGYEGRHIAMEKVASRTYRLRLEAARPGDAGTYRCLAKAYVRGS
GTRLREAASARSRPLPVHVREEGVVLEAVAWLAGGTVYRGETASLLCNISVRGGPPGLR
LAASWWVERPEDGELSSVPAQLVGGVGQDGVAELGVRPGGGPVSVELVGPRSHRLRL
HSLGPEDEGVYHCAPSAWVQHADYSWYQAGSARSGPVTVYPYMHALDTLFVPLLVGT
GVALVTGATVLGTITCCFMKRLRKR.

[0302] To obtain control EVs lacking the isopeptide domain-IGSF8 fusion protein, unmodified EVs from untransfected or mock transfected HEK293F cells are produced separately and in parallel with EVs incorporating recombinant proteins: cells are seeded into a bioreactor at a density equivalent to cells being prepared for transfection. After a 24 hour growth period, the cells are exchanged into new media to mimic a post-transfection media exchange. 96 hours following media exchange, the cultures were transferred into 50-mL conical tubes and centrifuged at 3,220×g for 30 min. The supernatant from these cultures were transferred to Amicon® Centrifugal Filter Units (100 kDa cut-off), concentrated and buffer exchanged into PBS. EVs are then filtered using Capto™ Core700 (Cytiva) Size Exclusion Chromatography (SEC) resin to remove non-EV-associated protein. Finally, the EVs are sterile filtered, using a 0.22 μm centrifugal filter column unit.

### Example 9: Fusion Protein Detection on the EV Surface

[0303] To ensure that EVs displayed the fusion protein construct encoded by the transfected plasmid and the fusion protein is oriented with correct transmembrane topology, isolated EVs are stained with fluorophore-conjugated anti-FLAG tag antibody and a membrane stain. The stained vesicles are evaluated using vesicle flow cytometry (vFC) (Cytoflex—Beckman Coulter). EVs are identified as membrane stain-positive particles. The amount of recombinant protein on each EV is detected using a fluorophore-conjugated antibody that binds specifically to the epitope sequence included in the primary sequence of the protein, and would only be available on the EV surface if the fusion protein is oriented in the intended topology (C-terminal domain in the lumen; N-terminal domain on the EV surface). The amount of recombinant protein on each evaluated EV is determined by the antibody signal/membrane-stained particle.

### Example 10: Covalent Attachment of ASO-Isopeptide Tag Conjugate to Tricatcher-1-IGSF8 Fusion Protein on Surface of an EV

[0304] The ASO-isopeptide tag(1) conjugate of Example 7 is coupled to the IGSF8 fusion protein displayed on EVs of Example 8 through the isopeptide bond formation between isopeptide tag(1) of the former and isopeptide domain-1 of the latter. Briefly, the lyophilized peptide-ASO conjugate of Example 7 is resuspended in 100% DMSO to make a 2.5 mM stock solution. This 2.5 mM ASO-peptide stock solution is diluted in 1×PBS to obtain a working solution of 2.5 μM peptide-ASO conjugate. EVs modified with Tricatcher-1-IGSF8 fusion protein and control unmodified EVs are thawed to RT.

[0305] To a 1.5-ml Eppendorf tube, a reaction mixture is prepared containing:

| | | |
|---|---|---|
| 500 | μL | Tricatcher-1-IGSF8-modified EVs or unmodified EVs |
| | | (2.9E11 EVs/mL in 1x PBS) |
| 56 | μL | BSA (100 mg/mL) in 1x PBS or 1x PBS |
| 6 | μL | 2 μM 5′-IsoPepTag1-ASO or 3′-IsoPepTag1-ASO |
| | | conjugate. Following mixing |

by pipetting up and down several times, the reaction tube is placed flat on a plate shaker set at 350 rpm and the reaction leading to spontaneous formation of isopeptide bond formation following binding of isopeptide tag(1) by isopeptide domain-1 on the surface of the Tricatcher-1-IGSF8-modified EVs to proceed at RT for 3 hrs.

[0306] Formation of isopeptide bond leading to covalent attachment of the 5′-IsoPepTag1-ASO or 3′-IsoPepTag1-ASO conjugate to Tricatcher-1-IGSF8-modified EVs but not to the control unmodified EVs is analyzed by denaturing gel electrophoresis. Briefly, aliquots from different reaction mixtures are prepared in a microfuge tube as follow:
[0307] 27 μL reaction sample
[0308] 10 μL NuPAGE™ LDS sample buffer (4×) (Invitrogen™)

[0309] 3 μL 500 mM DTT. Samples are mixed, vortexed briefly, spun and heated to 95° C. for 5 min before loading 15 μL per well of NuPAGE® Bis-Tris precast gel. Gel is run at 125V for 1 hr using 1×2-(N-morpholino)ethanesulfonic acid (MES) buffer, following gel manufacturer recommendation, with the loading dye front permitted to run off the gel in order to better separate high molecular weight bands. Seeblue Plus 2 Pre-stained Standard is used as molecular weight standard to follow the course of the electrophoresis and well as a reference for the determining the apparent molecular weight of the targeting moiety-VLM conjugate, in particular, the 5′-IsoPepTag1-ASO-Tricatcher-1-IGSF8 and 3′-IsoPepTag1-ASO-Tricatcher-1-IGSF8 conjugates.

[0310] Following electrophoresis, the gel plates are disassembled. The gel is place on a backsupport and in a ChemiDoc™ MP Imaging System (Bio-Rad) to record the location of the pre-stained molecular weight markers based on absorbance and location of Cy3 dye based on fluorescence. Epi-illumination with 520-545 nm excitation (Epi-green) light was used to excite Cy3 dye and the resulting Cy3 fluorescence captured on a CCD camera through a 650±50 nm bandpass filter. FIG. 11 shows the detection of Cy3 fluorescence around the 98 kDa region (ranging from about 80-150 kDa). Samples present in each lane of the gel are:

### Gel Lanes

| Lane | Sample |
|---|---|
| 2 | Unmodified EVs + 0.02 μM 5′-IsoPep1Tag- |
| | ASO + 10 mg/mL BSA |
| 3 | Unmodified EVs + 0.02 μM 3′-IsoPep1Tag- |
| | ASO + 10 mg/mL BSA |
| 4 | Unmodified EVs + 0.02 μM 5′-IsoPep1Tag- |
| | ASO |
| 5 | Unmodified EVs + 0.02 μM 3′-IsoPep1Tag- |
| | ASO |
| 6 | Unmodified EVs |
| 7 | Tricatcher-1-IGSFS-modified EVs + 0.02 μM |
| | 5′-IsoPep1Tag-ASO + 10 mg/mL BSA |
| 8 | Tricatcher-1-IGSFS-modified EVs + 0.02 μM |
| | 3′-IsoPep1Tag-ASO + 10 mg/mL BSA |
| 9 | Tricatcher-1-IGSF8-modified EVs + 0.02 μM |
| | 5′-IsoPep1Tag-ASO |
| 10 | Tricatcher-1-IGSF8-modified EVs + 0.02 μM |
| | 3′-IsoPep1Tag-ASO |
| 11 | Tricatcher-1-IGSF8-modified EVs |

[0312] When Tricatcher-1-IGSF8-modified EVs are incubated with Cy3-labeled IsoPep1Tag-ASO conjugate, a protein band displaying Cy3 fluorescence may be detected around 98 kDa region corresponding to the approximately size of Tricatcher-1-IGSF8 fusion protein (see lanes 7-10). This band is not detected when unmodified EVs (lacking the Tricatcher-1-IGSF8 fusion protein) is incubated with the Cy3-labeled IsoPep1Tag-ASO conjugates (lanes 2-5) or when Cy3-labeled IsoPep1Tag-ASO conjugate is left out of the incubation mixture (lanes 6 and 11). Presence of a band most prominently for the sample where Tricatcher-1-IGSF8-modified EVs is incubated with 0.02 μM C-IsoPep1Tag-ASO in the presence of 10 mg/mL BSA (lane 8) is consistent with the formation of an isopeptide bond between the isopeptide-1 domain of the Tricatcher-1-IGSF8 fusion protein and the isopeptide tag-1 of the Cy3-labeled C-IsoPep1Tag-ASO conjugate. Formation of such an isopeptide bond would lead to a covalent attachment of the Cy3-labeled conjugate (m.w. ˜8.6 to 8.7 kDa) to the high molecular weight fusion protein (m.w. ˜106 kDa) and the appearance of a Cy3 fluorescence band at about 98 kDa.

[0313] FIG. 11 also shows the importance of the placement of the isopeptide-1 tag and Cy3 dye relative to the antisense oligonucleotide (ASO; 5′-TGCGCTCCTGGACGTAGCC-3′) in the IsoPep1Tag-ASO conjugate. In particular, isopeptide tag-1 at the 3′ end of the ASO with the Cy3 label at the ASO 5′end results in 3′-IsoPep1Tag-ASO conjugate (5′-[/Cy3/-TGC GCT CCT GGA CGT AGC C]-3′-Cys-Nterm-AHIVMVDAYKPTK-Cterm), which is more efficient at forming a covalent bond (i.e., an isopeptide bond) with Tricatcher-1-IGSF8 fusion protein (lane 8) than the same isopeptide tag-1 conjugated to the 5′ end of the ASO with a cy3 dye at its 3′end (5′-IsoPep1Tag-ASO: Nterm-AHIVMVDAYKPTK-Cterm-Cys-5′-[TGC GCT CCT GGA CGT AGC C /Cy3/]-3′; lane 7). Presence of BSA (10 mg/mL) as a carrier in the reaction increases the yield of the coupling reaction between isopeptide domain-1 and isopeptide tag-1, as evident from the fact that the barely visible band in lane 7 is no longer observed in lane 9. Lanes 7 and 9 differ in that the incubation condition contains BSA in the former (lane 7) and lacks BSA in the latter (lane 9).

[0314] In conclusion, modified EVs and/or exosomes can be prepared with an isopeptide domain attached to a VLM (or alternatively, chimeric VLM), these modified EVs and/or exosomes can react with a molecule (or targeting moiety or ASO) of interest conjugated to an isopeptide tag resulting in a covalent attachment of the molecule (or targeting moiety or ASO) of interest to the VLM (or chimeric VLM) fusion protein. Covalent attachment of a molecule (or targeting moiety or ASO) of interest-isopeptide tag conjugate (or fusion peptide) to an isopeptide domain-VLM (or chimeric VLM) fusion protein is consistent with the formation of an isopeptide bond between the complementary isopeptide domain and isopeptide tag. Unexpectedly, efficiency of isopeptide bond formation for ASO-isopeptide tag conjugate may be affected by location of the isopeptide tag in relation to the ASO. This dramatic difference in isopeptide bond formation efficiency of an isopeptide domain on the surface of an EV or exosome to an isopeptide tag placed 5′ (FIG. 11, lane 7) or 3′ (FIG. 11, lane 8) to an ASO illustrates an unpredictability in the system which may be unique or exaggerated by the presence of an isopeptide domain being displayed on the surface of an EV or exosome, as the isopeptide tag placed 3′ to the ASO results in a significantly greater coupling efficiency than one placed 5′ to the ASO. Presence of BSA in the reaction mixture presumably reduces loss to non-specific sticking increasing yield of covalent coupling reaction between an isopeptide domain fusion protein and an isopeptide tag conjugate (or fusion peptide).

### Example 11: Covalent Attachment of GPC3 Affinity Peptide-Isopeptide-2 Tag Fusion Peptide (as a Targeting Moiety-Isopeptide Fusion Peptide) to Modified EVs and/or Exosomes Having a Fusion Protein Comprising Isopeptide-2 and IGSF8

[0315] HEK293F cells are transfected with expression constructs for IGSF-isopeptide domain fusion proteins, and modified EVs are isolated from the culture media following transfection, as described in Examples 2 and 8. The expression plasmids used are provided in FIGS. 2, 3 and 4 to produce the proteins with SEQ ID NO: 200, 202, and 204 corresponding to Isopeptide(2) domain-IGSF8 VLM fusion protein (also referred to as “Iso-2” in FIGS. 12 and 13), Isopeptide(1) Isopeptide(2) domains-IGSF VLM fusion protein (also referred to as “Di” in FIGS. 12 and 13) and Isopeptide(3)_Isopeptide(1)_Isopeptide(2) domains-IGSF8 VLM fusion protein (also referred to as “Tricatcher-1-IGSF8” in FIG. 11 and “Tri” in FIGS. 12 and 13), respectively. To assess the presence of the isopeptide domains on the outside of the EV surface, standard vFC Flag staining assay with fluorescent dye-labelled anti-Flag antibody and fluorescent membrane dye is to detect recombinant protein on the EV surface. As negative control, unmodified HEK293F EVs are isolated from culture media of untreated or mock transfected HEK293F cells. Isolated EVs in 1×PBS flash frozen in liquid nitrogen and stored at −70° C. freezer.

[0316] Fusion peptide (or fusion protein or fusion polypeptide) comprising a GPC3 affinity peptide and isopeptide-2 tag is obtained from a custom peptide synthesis service at >98% purity (Thermo Fisher Scientific). The peptides are:

(N-IsoPep2Tag-PEPN; SEQ ID NO: 242)
KLGDIEFIKVNKSGGGGGGGGeqkliseedITHVSPNQGGLPS
and
(C-IsoPep2Tag-PEPN; SEQ ID NO: 240)
THVSPNQGGLPSSGGGGSGGGGeqkliseedlKLGDIEFIKVNK,

where the sequence in italics signifies isopeptide-2 tag, underline signifies a linker, lowercase letter signifies myc epitope tag, and bold signifies an affinity peptide or targeting moiety, THVSPNQGGLPS (SEQ ID NO: 196; “PEPN”), directed to glypican-3 (GPC3) cell surface protein. The lyophilized fusion peptide powder is stored at −70° C.

[0317] Before use, the frozen EV stock is thawed in a water bath and working EV solution is obtained by diluting in 1×PBS to 5E10 EV particles/mL. The lyophilized GPC3 affinity peptide-isopeptide tag-2 fusion protein is brought to room temperature and resuspended in 100% DMSO to make a 1 mM stock solution. This targeting moiety fusion protein stock solution is diluted in 1×PBS to obtain a working solution of 200 μM GPC3 affinity peptide-isopeptide-2 tag fusion protein.

[0318] Using a 96-well microtiter plate, a reaction mix is prepared for each sample:

| | | |
|---|---|---|
| 25 | μL | modified or unmodified EVs (5E10 EV particles/mL) |
| 12.5 | μL | 200 μM GPC3 affinity peptide-isopeptide-2 tag fusion protein |
| 12.5 | μL | 1x PBS (w/o calcium or magnesium) |

for a total volume of 50 μL. Final concentration of modified or unmodified EVs is 2.5E10 EV particles/mL and of the GPC3 affinity peptide-isopeptide tag-2 fusion protein is 50 μM in the reaction mixture, corresponding to about 0.3 mg/mL. Samples are mixed by repeated pipetting. The microtiter plate is covered, spun at 50×g for 1 min and incubated at RT with shaking on an orbital shaker for 3 hrs. Reaction is terminated by adding 12.5 μL of 5× termination buffer (5% SDS, 300 mM Tris-HCl (pH 6.8)), mixing and transferring to 1.5-mL microfuge tube, and heating the tube to 95° C., 5 min. Samples are analyzed on a combined automated capillary electrophoresis and Western blot system (Jess™ Simple Western system) according to the manufacturer ProteinSimple® (San Jose, CA), using anti-myc or anti-FLAG antibody as a primary antibody followed by a goat anti-mouse secondary antibody-conjugated to horseradish peroxidase for chemiluminescent detection.

[0319] FIG. 12 shows a Western blot analysis obtained through the Jess™ Simple Western system of EVs modified with a fusion protein comprising an isopeptide-2 domain and IGSF8 VLM or unmodified EVs following with incubation with 50 μM Isopeptide-2 tag-PEPN fusion peptide having the amino sequence as provided in SEQ ID NO: 240 or 242. Anti-Flag antibody is directed to the Flag epitope tag present in IGSF8 fusion proteins linked to an Isopeptide-2 domain (SEQ ID NO: 200 from expression vector in FIG. 2), Isopeptide-1 and Isopeptide-2 domains (SEQ ID NO: 202 from expression vector in FIG. 3) or Isopeptide-1, Isopeptide-2 and Isopeptide-3 domains (SEQ ID NO: 204 from expression vector in FIG. 4; also called Tricatcher-1-IGSF8 VLM fusion protein), indicated as “Iso-2,” “Di” and “Tri,” respectively, for “Domain+VLM” status. As can be seen in the last four lanes, prominent band or group of bands corresponding to proteins with an apparent molecule weight of about 70 to 120 kDa are detected by the anti-Flag antibody, consistent with the anti-Flag antibody detecting the Flag epitope tag in the IGSF8 fusion proteins of the Iso-2-modified EVs or Di-modified EVs. The Iso-2 and Di IGSF8 fusion proteins have molecular weights of about 70.5 kDa and 72.6 kDa, respectively.

[0320] The “Iso-2,” “Di” and “Tri” modified EV or exosome all comprise a fusion protein comprising an isopeptide(2) domain and IGSF8 as a VLM. Binding of the Isopeptide-2 tag fusion peptide to the Isopeptide-2 domain results in formation of an isopeptide bond and presence of the Isopeptide-2 tag fusion peptide in the high molecular weight region at the location of the Isopeptide-2 domain-IGSF8 fusion protein (see left panel of FIG. 12) while unreacted Isopeptide-2 tag fusion peptide can be seen in the low molecular weight portion (around 12 kDa or less). Spreading of the anti-Flag signals from about 70 to 120 kDa (see right panel of FIG. 12) is consistent with covalent attachment of Isopeptide-2 tag-PEPN fusion peptide to the IGSF8 fusion protein upon binding of the isopeptide-2 domain with the isopeptide-2 tag and subsequent formation of an isopeptide bond. Such an attachment results in a IGSF fusion protein with a isopeptide-2 tag-PEPN branch, which not only increases the molecular weight of the resulting conjugate but may also retard gel mobility beyond what would be observed for a linear polymer with a similar molecular weight.

[0321] Use of the anti-myc antibody on an aliquot of the same sample showed that the myc-epitope-labelled Isopeptide-2 tag-PEPN fusion peptide can be detected at about the same region as that for the IGSF8 fusion proteins (see lanes corresponding to “Iso-2” and “Di” in the left panel and compare the bands observed for the anti-myc antibody with the bands seen in the respective lanes in the right panel observed for the anti-Flag antibody). Analysis of the control sample (unmodified EVs incubated with myc-epitope-labelled Isopeptide-2 tag-THV fusion peptide (last two lanes of the left panel labelled as “Un”)) with anti-myc antibody showed absence of any notable band in the high molecular weight region of the gel with signal only detected at the bottom of the gel corresponding to unreacted Isopeptide-2 tag-PEPN fusion peptide, indicating a requirement for a modified EV with IGSF8 fusion protein for the covalent attachment of the Isopeptide-2 tag-PEPN fusion peptide in order to detect anti-myc antibody signal in the high molecular weight region of the gel (e.g., around 70 to 120 kDa).

[0322] Presence of an isopeptide domain and isopeptide tag in the IGSF8 fusion protein and Isopeptide-2 tag-PEPN fusion peptide, respectively, can lead to covalent attachment of these two separate polypeptide chains as a result of formation of an isopeptide bond between the isopeptide domain and its complementary isopeptide tag. Unexpectedly, significant differences in coupling efficiency exists depending on placement of the interacting partners within a fusion polypeptide. As can be seen in FIG. 12, placement of the isopeptide tag at the N-terminus of the fusion peptide (lanes marked by “N” for “Tag orientation”) results in a significantly greater coupling efficiency than placement of the isopeptide at the C-terminus of the fusion peptide (lanes marked by “C”). While this difference may be due to differences in the binding affinity for such paired interaction in solution, alternatively, the differences may be a consequence of binding reaction or isopeptide bond formation occurring with a binding partner (e.g., an isopeptide domain) tethered to an EV or exosome through a transmembrane protein (e.g., a VLM or chimeric VLM). Such dramatic efficiencies illustrate unpredictability of isopeptide bond formation for a binding partner tethered to an EV or exosome through a transmembrane protein.

### Example 12: Covalent Attachment of GPC3 Affinity Peptide-Isopeptide-1 Tae Fusion Peptide or Isopeptide-3 Tag Fusion Peptide to IGSF8 Fusion Protein Modified EVs and/or Exosomes

[0323] EVs were harvested and purified from producer cells transfected with each of the indicated recombinant isopeptide domain-containing proteins as described above in Example 11. EVs denoted as “Un” were harvested and purified in parallel from untransfected cells. Two additional GPC3 affinity peptide-Isopeptide Tag fusion peptides, namely to either Isopeptide-1 tag or Isopeptide-3 tag, are tested for the ability form a covalent bond (i.e., isopeptide bond) with the IGSF8 fusion proteins comprising IGSF8 as a VLM and an Isopeptide-2 domain (SEQ ID NO: 200 from expression vector in FIG. 2), Isopeptide-1 and Isopeptide-2 domains (SEQ ID NO: 202 from expression vector in FIG. 3) or Isopeptide-1, Isopeptide-2 and Isopeptide-3 domains (SEQ ID NO: 204 from expression vector in FIG. 4; also called Tricatcher-1-IGSF8 fusion protein), indicated as “Iso-2,” “Di” and “Tri,” respectively, for the Isopeptide domain-VLM status (see FIG. 13). GPC3 affinity peptide (PEPN)-Isopeptide-1 Tag fusion peptide and GPC3 affinity peptide-Isopeptide-3 Tag fusion peptide additionally have an S-peptide epitope tag (S-tag) and V5 epitope tag, respectively; while the IGSF fusion proteins all have a Flag epitope tag.

[0324] Fusion peptides containing the indicated isopeptide tag displayed at either the N- or C-terminus were mixed with purified EVs and incubated 3 hours at room temperature. Samples from these mixtures were then removed and heated at 95° C. in 1% SDS, before being subjected to capillary electrophoresis and blotted to identify the approximate molecular weight of the reporter peptide. High molecular weight bands detected with the indicated reporter peptide-specific antibodies demonstrate the formation of a covalent bond between reactive isopeptide tag and isopeptide domain pairs. The band in lanes blotted with anti-Flag antibody indicates the approximate molecular weight of the isopeptide domain-IGSF fusion protein. Note that the “Di” construct contains the isopeptide-1 domain and the isopeptide-2 domain, while the “Tri” construct includes all 3 isopeptide domains. The pattern of high molecular weight bands formed between specific fusion peptides and their cognate isopeptide domains demonstrates the specificity of each fusion peptide for a specific isopeptide domain.

[0325] In conclusion, a stockpile of modified EVs displaying an isopeptide domain or isopeptide tag may be readily functionalized with a molecule of interest or targeting moiety of interest through the formation of a covalent bond (an isopeptide bond) between complementary isopeptide domain and isopeptide tag. A fusion peptide (or fusion protein or conjugate) comprising the molecule of interest or targeting moiety of interest and an isopeptide domain or isopeptide tag can be made and similarly stockpiled. When required, the modified EVs and/or exosomes comprising a fusion protein of an isopeptide domain or isopeptide tag and a VLM (or chimeric VLM) can be mixed with appropriate fusion peptide (or fusion protein or conjugate) comprising a molecule of interest or targeting moiety of interest and an isopeptide tag or isopeptide domain, and incubated to permit isopeptide bond formation resulting in an EV and/or exosome functionalized with a molecule of interest or targeting moiety of interest.

[0326] It is understood that the disclosed invention is not limited to the particular methodology, protocols and materials described as these can vary. It is also understood that the terminology used herein is for the purposes of describing particular embodiments only and is not intended to limit the scope of the present invention which will be limited only by the appended claims. Those skilled in the art will recognize or be able to ascertain using no more than routine experimentation, many equivalents to the specific embodiments of the invention described herein. Such equivalents are intended to be encompassed by the following claims.

TABLE 1
Isopeptide Domains and Isopeptide Tags

SEQ ID NO: Sequence
1:
GGCGCCATGGTGGACACCCTGAGCGGCCTGAGCAGCGAGCAGGGCCAGAGCGGC
GACATGACCATCGAGGAGGACAGCGCCACCCACATCAAGTTCAGCAAGAGAGAC
GAGGACGGCAAGGAGCTGGCCGGCGCCACCATGGAGCTGAGAGACAGCAGCGGC
AAGACCATCAGCACCTGGATCAGCGACGGCCAGGTGAAGGACTTCTACCTGTACC
CCGGCAAGTACACCTTCGTGGAGACCGCCGCCCCCGACGGCTACGAGGTGGCCAC
CGCCATCACCTTCACCGIGAACGAGCAGGGCCAGGTGACCGTGAACGGCAAGGCC
ACCAAGGGCGACGCCCACATC
2:
GAMVDTLSGLSSEQGQSGDMTIEEDSATHIKFSKRDEDGKELAGATMELRDSSGKTIS
TWISDGQVKDFYLYPGKYTFVETAAPDGYEVATAITFTVNEQGQVTVNGKATKGDA
HI
3:
GCCATGGTGGACACCCTGAGCGGCCTGAGCAGCGAGCAGGGCCAGAGCGGCGAC
ATGACCATCGAGGAGGACAGCGCCACCCACATCAAGTTCAGCAAGAGAGACGAG
GACGGCAAGGAGCTGGCCGGCGCCACCATGGAGCTGAGAGACAGCAGCGGCAAG
ACCATCAGCACCTGGATCAGCGACGGCCAGGTGAAGGACTTCTACCTGTACCCCG
GCAAGTACACCTTCGTGGAGACCGCCGCCCCCGACGGCTACGAGGTGGCCACCGC
CATCACCTTCACCGTGAACGAGCAGGGCCAGGTGACCGTGAACGGCAAGGCCACC
AAGGGCGACGCCCACATC
4:
AMVDTLSGLSSEQGQSGDMTIEEDSATHIKFSKRDEDGKELAGATMELRDSSGKTIST
WISDGQVKDFYLYPGKYTFVETAAPDGYEVATAITFTVNEQGQVTVNGKATKGDAHI
5:
ATGGTGGACACCCTGAGCGGCCTGAGCAGCGAGCAGGGCCAGAGCGGCGACATG
ACCATCGAGGAGGACAGCGCCACCCACATCAAGTTCAGCAAGAGAGACGAGGAC
GGCAAGGAGCTGGCCGGCGCCACCATGGAGCTGAGAGACAGCAGCGGCAAGACC
ATCAGCACCTGGATCAGCGACGGCCAGGTGAAGGACTTCTACCTGTACCCCGGCA
AGTACACCTTCGTGGAGACCGCCGCCCCCGACGGCTACGAGGTGGCCACCGCCAT
CACCTTCACCGTGAACGAGCAGGGCCAGGTGACCGTGAACGGCAAGGCCACCAA
GGGCGACGCCCACATC
6:
MVDTLSGLSSEQGQSGDMTIEEDSATHIKFSKRDEDGKELAGATMELRDSSGKTISTW
ISDGQVKDFYLYPGKYTFVETAAPDGYEVATAITFTVNEQGQVTVNGKATKGDAHI
7:
GTGGACACCCTGAGCGGCCTGAGCAGCGAGCAGGGCCAGAGCGGCGACATGACC
ATCGAGGAGGACAGCGCCACCCACATCAAGTTCAGCAAGAGAGACGAGGACGGC
AAGGAGCTGGCCGGCGCCACCATGGAGCTGAGAGACAGCAGCGGCAAGACCATC
AGCACCTGGATCAGCGACGGCCAGGTGAAGGACTTCTACCTGTACCCCGGCAAGT
ACACCTTCGTGGAGACCGCCGCCCCCGACGGCTACGAGGTGGCCACCGCCATCAC
CTTCACCGTGAACGAGCAGGGCCAGGTGACCGTGAACGGCAAGGCCACCAAGGG
CGACGCCCACATC
8:
VDTLSGLSSEQGQSGDMTIEEDSATHIKFSKRDEDGKELAGATMELRDSSGKTISTWIS
DGQVKDFYLYPGKYTFVETAAPDGYEVATAITFTVNEQGQVTVNGKATKGDAHI
9:
GTGGACACCCTGAGCGGCCTGAGCAGCGAGCAGGGCCAGAGCGGCGACATGACC
ATCGAGGAGGACAGCGCCACCCACATCAAGTTCAGCAAGAGAGACGAGGACGGC
AAGGAGCTGGCCGGCGCCACCATGGAGCTGAGAGACAGCAGCGGCAAGACCATC
AGCACCTGGATCAGCGACGGCCAGGTGAAGGACTTCTACCTGTACCCCGGCAAGT
ACACCTTCGTGGAGACCGCCGCCCCCGACGGCTACGAGGTGGCCACCGCCATCAC
CTTCACCGTGAACGAGCAGGGCCAGGTGACCGTGAACGGCAAGGCCACCAAGGG
CGACGCCCACATCGAC
10:
VDTLSGLSSEQGQSGDMTIEEDSATHIKFSKRDEDGKELAGATMELRDSSGKTISTWIS
DGQVKDFYLYPGKYTFVETAAPDGYEVATAITFTVNEQGQVTVNGKATKGDAHID
11:
GTGGACACCCTGAGCGGCCTGAGCAGCGAGCAGGGCCAGAGCGGCGACATGACC
ATCGAGGAGGACAGCGCCACCCACATCAAGTTCAGCAAGAGAGACGAGGACGGC
AAGGAGCTGGCCGGCGCCACCATGGAGCTGAGAGACAGCAGCGGCAAGACCATC
AGCACCTGGATCAGCGACGGCCAGGTGAAGGACTTCTACCTGTACCCCGGCAAGT
ACACCTTCGTGGAGACCGCCGCCCCCGACGGCTACGAGGTGGCCACCGCCATCAC
CTTCACCGTGAACGAGCAGGGCCAGGTGACCGTGAACGGCAAGGCCACCAAGGG
C
12:
VDTLSGLSSEQGQSGDMTIEEDSATHIKFSKRDEDGKELAGATMELRDSSGKTISTWIS
DGQVKDFYLYPGKYTFVETAAPDGYEVATAITFTVNEQGQVTVNGKATKG
13:
GTGGACACCCTGAGCGGCCTGAGCAGCGAGCAGGGCCAGAGCGGCGACATGACC
ATCGAGGAGGACAGCGCCACCCACATCAAGTTCAGCAAGAGAGACGAGGACGGC
AAGGAGCTGGCCGGCGCCACCATGGAGCTGAGAGACAGCAGCGGCAAGACCATC
AGCACCTGGATCAGCGACGGCCAGGTGAAGGACTTCTACCTGTACCCCGGCAAGT
ACACCTTCGTGGAGACCGCCGCCCCCGACGGCTACGAGGTGGCCACCGCCATCAC
CTTCACCGTGAACGAGCAGGGCCAGGTGACCGTGAACGGCAAGGCCACCAAG
14:
VDTLSGLSSEQGQSGDMTIEEDSATHIKFSKRDEDGKELAGATMELRDSSGKTISTWIS
DGQVKDFYLYPGKYTFVETAAPDGYEVATAITFTVNEQGQVTVNGKATK
15:
GTGGACACCCTGAGCGGCCTGAGCAGCGAGCAGGGCCAGAGCGGCGACATGACC
ATCGAGGAGGACAGCGCCACCCACATCAAGTTCAGCAAGAGAGACGAGGACGGC
AAGGAGCTGGCCGGCGCCACCATGGAGCTGAGAGACAGCAGCGGCAAGACCATC
AGCACCTGGATCAGCGACGGCCAGGTGAAGGACTTCTACCTGTACCCCGGCAAGT
ACACCTTCGTGGAGACCGCCGCCCCCGACGGCTACGAGGTGGCCACCGCCATCAC
CTTCACCGTGAACGAGCAGGGCCAGGTGACCGTGAACGGCAAGGCCACCAAGGG
CGACGCC
16:
VDTLSGLSSEQGQSGDMTIEEDSATHIKFSKRDEDGKELAGATMELRDSSGKTISTWIS
DGQVKDFYLYPGKYTFVETAAPDGYEVATAITFTVNEQGQVTVNGKATKGDA
17:
GTGGACACCCTGAGCGGCCTGAGCAGCGAGCAGGGCCAGAGCGGCGACATGACC
ATCGAGGAGGACAGCGCCACCCACATCAAGTTCAGCAAGAGAGACGAGGACGGC
AAGGAGCTGGCCGGCGCCACCATGGAGCTGAGAGACAGCAGCGGCAAGACCATC
AGCACCTGGATCAGCGACGGCCAGGTGAAGGACTTCTACCTGTACCCCGGCAAGT
ACACCTTCGTGGAGACCGCCGCCCCCGACGGCTACGAGGTGGCCACCGCCATCAC
CTTCACCGTGAACGAGCAGGGCCAGGTGACCGTGAACGGCAAGGCCACCAAGGG
CGACGCCCAC
18:
VDTLSGLSSEQGQSGDMTIEEDSATHIKFSKRDEDGKELAGATMELRDSSGKTISTWIS
DGQVKDFYLYPGKYTFVETAAPDGYEVATAITFTVNEQGQVTVNGKATKGDAH
19:
GACACCCTGAGCGGCCTGAGCAGCGAGCAGGGCCAGAGCGGCGACATGACCATC
GAGGAGGACAGCGCCACCCACATCAAGTTCAGCAAGAGAGACGAGGACGGCAAG
GAGCTGGCCGGCGCCACCATGGAGCTGAGAGACAGCAGCGGCAAGACCATCAGC
ACCTGGATCAGCGACGGCCAGGTGAAGGACTTCTACCTGTACCCCGGCAAGTACA
CCTTCGTGGAGACCGCCGCCCCCGACGGCTACGAGGTGGCCACCGCCATCACCTT
CACCGTGAACGAGCAGGGCCAGGTGACCGTGAACGGCAAGGCCACCAAGGGCGA
CGCCCACATC
20:
DTLSGLSSEQGQSGDMTIEEDSATHIKFSKRDEDGKELAGATMELRDSSGKTISTWISD
GQVKDFYLYPGKYTFVETAAPDGYEVATAITFTVNEQGQVTVNGKATKGDAHI
21:
GACAGCGCCACCCACATCAAGTTCAGCAAGAGAGACGAGGACGGCAAGGAGCTG
GCCGGCGCCACCATGGAGCTGAGAGACAGCAGCGGCAAGACCATCAGCACCTGG
ATCAGCGACGGCCAGGTGAAGGACTTCTACCTGTACCCCGGCAAGTACACCTTCG
TGGAGACCGCCGCCCCCGACGGCTACGAGGTGGCCACCGCCATCACCTTCACCGT
GAACGAGCAGGGCCAGGTGACCGTGAACGGCAAGGCCACCAAGGGCGACGCCCA
CATC
22:
DSATHIKFSKRDEDGKELAGATMELRDSSGKTISTWISDGQVKDFYLYPGKYTFVETA
APDGYEVATAITFTVNEQGQVTVNGKATKGDAHI
23:
GTGGACACCCTGAGCGGCCTGAGCAGCGAGCAGGGCCAGAGCGGCGACATGACC
ATCGAGGAGGACAGCGCCACCCACATCAAGTTCAGCAAGAGAGACGAGGACGGC
AAGGAGCTGGCCGGCGCCACCATGGAGCTGAGAGACAGCAGCGGCAAGACCATC
AGCACCTGGATCAGCGACGGCCAGGTGAAGGACTTCTACCTGTACCCCGGCAAGT
ACACCTTCGTGGAGACCGCCGCCCCCGACGGCTACGAGGTGGCCACCGCCATCAC
CTTCACCGTGAACGAGCAGGGCCAGGTGACCGTGAACGGCAAGGCCACCAAGGG
CGACGCCCACATCGAC
24:
VDTLSGLSSEQGQSGDMTIEEDSATHIKFSKRDEDGKELAGATMELRDSSGKTISTWIS
DGQVKDFYLYPGKYTFVETAAPDGYEVATAITFTVNEQGQVTVNGKATKGDAHID
25:
GCCATGGTGGACACCCTGAGCGGCCTGAGCAGCGAGCAGGGCCAGAGCGGCGAC
ATGACCATCGAGGAGGACAGCGCCACCCACATCAAGTTCAGCAAGAGAGACGAG
GACGGCAAGGAGCTGGCCGGCGCCACCATGGAGCTGAGAGACAGCAGCGGCAAG
ACCATCAGCACCTGGATCAGCGACGGCCAGGTGAAGGACTTCTACCTGTACCCCG
GCAAGTACACCTTCGTGGAGACCGCCGCCCCCGACGGCTACGAGGTGGCCACCGC
CATCACCTTCACCGTGAACGAGCAGGGCCAGGTGACCGTGAACGGCAAGGCCACC
AAGGGCGACGCCCACATCGAC
26:
AMVDTLSGLSSEQGQSGDMTIEEDSATHIKFSKRDEDGKELAGATMELRDSSGKTIST
WISDGQVKDFYLYPGKYTFVETAAPDGYEVATAITFTVNEQGQVTVNGKATKGDAHI
D
27:
GTGGACACCCTGAGCAGACTGAGCAGCGAGCAGGGCCAGAGCGGCGACATGACC
ATCGAGGAGGACAGCGCCACCCACATCAAGTTCAGCAAGAGAGACGAGGACGGC
AAGGAGCTGGCCGGCGCCACCATGGAGCTGAGAGACAGCAGCGGCAAGACCATC
AGCACCTGGATCAGCGACGGCCAGGTGAAGGACTTCTACCTGTACCCCGGCAAGT
ACACCTTCTGCAGAAACAGAAGCACCAGAAGATACGGCGGCAGCACCGCCATCC
CCTACAGCATGGAGCAGGGCCAGGTGACCGTGATGGCCAGCAAC
28:
VDTLSRLSSEQGQSGDMTIEEDSATHIKFSKRDEDGKELAGATMELRDSSGKTISTWIS
DGQVKDFYLYPGKYTFCRNRSTRRYGGSTAIPYSMEQGQVTVMASN
29:
GACAGCGCCACCCACATCAAGTTCAGCAAGAGAGACGAGGACGGCAAGGAGCTG
GCCGGCGCCACCATGGAGCTGAGAGACAGCAGCGGCAAGACCATCAGCACCTGG
ATCAGCGACGGCCAGGTGAAGGACTICTACCTGTACCCCGGCAAGTACACCTTCG
TGGAGACCGCCGCCCCCGACGGCTACGAGGTGGCCACCGCCATCACCTTCACCGT
GAACGAGCAGGGCCAGGTGACCGTGAACGGCAAGGCCACCAAG
30:
DSATHIKFSKRDEDGKELAGATMELRDSSGKTISTWISDGQVKDFYLYPGKYTFVETA
APDGYEVATAITFTVNEQGQVTVNGKATK
31:
GACAGCGCCACCCACATCAAGTTCAGCAAGAGAGACGAGGACGGCAAGGAGCTG
GCCGGCGCCACCATGGAGCTGAGAGACAGCAGCGGCAAGACCATCAGCACCTGG
ATCAGCGACGGCCAGGTGAAGGACTICTACCTGTACCCCGGCAAGTACACCTTCG
TGGAGACCGCCGCCCCCGACGGCTACGAGGTGGCCACCGCCATCACCTTCACCGT
GAACGAGCAGGGCCAGGTGACCGTGAACGGC
32:
DSATHIKFSKRDEDGKELAGATMELRDSSGKTISTWISDGQVKDFYLYPGKYTFVETA
APDGYEVATAITFTVNEQGQVTVNG
33:
GACAGCGCCACCCACATCAAGTTCAGCAAGAGAGACGAGGACGGCAAGGAGCTG
GCCGGCGCCACCATGGAGCTGAGAGACAGCAGCGGCAAGACCATCAGCACCTGG
ATCAGCGACGGCCAGGTGAAGGACTTCTACCTGTACCCCGGCAAGTACACCTTCG
TGGAGACCGCCGCCCCCGACGGCTACGAGGTGGCCACCGCCATCACCTTCACCGT
GAACGAGCAGGGCCAGGTGACCGTGAACGGCAAGGCCACCAAGGGCGACGCCCA
CATC
34:
DSATHIKFSKRDEDGKELAGATMELRDSSGKTISTWISDGQVKDFYLYPGKYTFVETA
APDGYEVATAITFTVNEQGQVTVNGKATKGDAHI
35:
GACAGCGCCACCCACATCAAGTTCAGCAAGAGAGACATCGACGGCAAGGAGCTG
GCCGGCGCCACCATGGAGCTGAGAGACAGCAGCGGCAAGACCATCAGCACCTGG
ATCAGCGACGGCCAGGTGAAGGACTTCTACCTGATGCCCGGCAAGTACACCTTCG
TGGAGACCGCCGCCCCCGACGGCTACGAGGTGGCCACCGCCATCACCTTCACCGT
GAACGAGCAGGGCCAGGTGACCGTGAACGGCAAGGCCACCAAGGGCGACGCCCA
CGCCGTGATGGTGGCCGCC
36:
DSATHIKFSKRDIDGKELAGATMELRDSSGKTISTWISDGQVKDFYLMPGKYTFVETA
APDGYEVATAITFTVNEQGQVTVNGKATKGDAHAVMVAA
37:
GACAGCGCCACCCACATCAAGTTCAGCAAGAGAGACGAGGACGGCAAGGAGCTG
GCCGGCGCCACCATGGAGCTGAGAGACAGCAGCGGCAAGACCATCAGCACCTGG
ATCAGCGACGGCCAGGTGAAGGACTICTACCTGTACCCCGGCAAGTACACCTTCG
TGGAGACCGCCGCCCCCGACGGCTACGAGGTGGCCACCGCCATCACCTTCACCGT
GAACGAGCAGGGCCAGGTGACCGTGAACGGCAAGGCCACCAAGGGC
38:
DSATHIKFSKRDEDGKELAGATMELRDSSGKTISTWISDGQVKDFYLYPGKYTFVETA
APDGYEVATAITFTVNEQGQVTVNGKATKG
39:
GTGGACACCCTGAGCGGCCTGAGCAGCGAGCAGGGCCAGAGCGGCGACATGACC
ATCGAGGAGGACAGCGCCACCCACATCAAGTTCAGCAAGAGAGACGAGGACGGC
AAGGAGCTGGCCGGCGCCACCATGGAGCTGAGAGACAGCAGCGGCAAGACCATC
AGCACCTGGATCAGCGACGGCCAGGTGAAGGACTTCTACCTGTACCCCGGCAAGT
ACACCTTCGTGGAGACCGCCGCCCCCGACGGCTACGAGGTGGCCACCGCCATCAC
CTTCACCGTGAACGAGCAGGGCCAGGTGACCGTGAACGGCCTGGAG
40:
VDTLSGLSSEQGQSGDMTIEEDSATHIKFSKRDEDGKELAGATMELRDSSGKTISTWIS
DGQVKDFYLYPGKYTFVETAAPDGYEVATAITFTVNEQGQVTVNGLE
41:
ATGGTGGACACCCTGAGCGGCCTGAGCAGCGAGCAGGGCCAGAGCGGCGACATG
ACCATCGAGGAGGACAGCGCCACCCACATCAAGTTCAGCAAGAGAGACGAGGAC
GGCAAGGAGCTGGCCGGCGCCACCATGGAGCTGAGAGACAGCAGCGGCAAGACC
ATCAGCACCTGGATCAGCGACGGCCAGGTGAAGGACTTCTACCTGTACCCCGGCA
AGTACACCTTCGTGGAGACCGCCGCCCCCGACGGCTACGAGGTGGCCACCGCCAT
CACCTTCACCGTGAACGAGCAGGGCCAGGTGACCGTGAACGGCAAGGCCACCAA
G
42:
MVDTLSGLSSEQGQSGDMTIEEDSATHIKFSKRDEDGKELAGATMELRDSSGKTISTW
ISDGQVKDFYLYPGKYTFVETAAPDGYEVATAITFTVNEQGQVTVNGKATK
43:
GTGGACACCCTGAGCGGCCTGAGCAGCGAGCAGGGCCAGAGCGGCGACATGACC
ATCGAGGAGGACAGCGCCACCCACATCAAGTTCAGCAAGAGAGACGAGGACGGC
AAGGAGCTGGCCGGCGCCACCATGGAGCTGAGAGACAGCAGCGGCAAGACCATC
AGCACCTGGATCAGCGACGGCCAGGTGAAGGACTTCTACCTGTACCCCGGCAAGT
ACACCTTCGTGGAGACCGCCGCCCCCGACGGCTACGAGGTGGCCACCGCCATCAC
CTTCACCGTGAACGAGCAGGGCCAGGTGACCGTGAACGGCAAGGCCACCAAGGG
C
44:
VDTLSGLSSEQGQSGDMTIEEDSATHIKFSKRDEDGKELAGATMELRDSSGKTISTWIS
DGQVKDFYLYPGKYTFVETAAPDGYEVATAITFTVNEQGQVTVNGKATKG
45:
GTGACCACCCTGAGCGGCCTGAGCGGCGAGCAGGGCCCCAGCGGCGACATGACC
ACCGAGGAGGACAGCGCCACCCACATCAAGTTCAGCAAGAGAGACGAGGACGGC
AGAGAGCTGGCCGGCGCCACCATGGAGCTGAGAGACAGCAGCGGCAAGACCATC
AGCACCTGGATCAGCGACGGCCACGTGAAGGACTTCTACCTGTACCCCGGCAAGT
ACACCTTCGTGGAGACCGCCGCCCCCGACGGCTACGAGGTGGCCACCGCCATCAC
CTTCACCGTGAACGAGCAGGGCCAGGTGACCGTGAACGGCGAGGCCACCAAGGG
CGACGCCCACACC
46:
VTTLSGLSGEQGPSGDMTTEEDSATHIKFSKRDEDGRELAGATMELRDSSGKTISTWIS
DGHVKDFYLYPGKYTFVETAAPDGYEVATAITFTVNEQGQVTVNGEATKGDAHT
47:
ATGACCATCGAGGAGGACAGCGCCACCCACATCAAGTTCAGCAAGAGAGACGAG
GACGGCAAGGAGCTGGCCGGCGCCACCATGGAGCTGAGAGACAGCAGCGGCAAG
ACCATCAGCACCTGGATCAGCGACGGCCAGGTGAAGGACTTCTACCTGTACCCCG
GCAAGTACACCTTCGTGGAGACCGCCGCCCCCGACGGCTACGAGGTGGCCACCGC
CATCACCTTCACCGTGAACGAGCAGGGCCAGGTGACC
48:
MTIEEDSATHIKFSKRDEDGKELAGATMELRDSSGKTISTWISDGQVKDFYLYPGKYT
FVETAAPDGYEVATAITFTVNEQGQVT
49:
ATCGAGACCGAGCAGAACCTGCCCAACGAGGACGGCCAGAGCGGCAACATCATC
GAGCAGGAGGACAGCAAGACCCTGGTGAAGTTCAGCAAGAGAGACATCAAGGGC
AACGAGCTGGCCGGCGCCACCATCGAGCTGAGAGACCTGAGCGGCAAGAGCATC
CAGAGCTGGGTGAGCGACGGCAAGGCCAAGGACTTCTACCTGCTGCCCGGCAGCT
ACGAGTTCGTGGAGACCGCCGCCCCCGAGGGCTACCAGATCGCCACCAAGATCAT
GTTCACCATCAGCACCGACGGCAGAATCACCGTGGACGGCCAGCTGGTG
50:
IETEQNLPNEDGQSGNIIEQEDSKTLVKFSKRDIKGNELAGATIELRDLSGKSIQSWVSD
GKAKDFYLLPGSYEFVETAAPEGYQIATKIMFTISTDGRITVDGQLV
51:
GAGGAGGACAGCGCCACCCACATCAAGTTCAGCAAGAGAGACGAGGACGGCAAG
GAGCTGGCCGGCGCCACCATGGAGCTGAGAGACAGCAGCGGCAAGACCATCAGC
ACCTGGATCAGCGACGGCCAGGTGAAGGACTTCTACCTGTACCCCGGCAAGTACA
CCTTCGTGGAGACCGCCGCCCCCGACGGCTACGAGGTGGCCACCGCCATCACCTT
CACCGTGAACGAGCAGGGCCAGGTGACCGTGAACGGCAAGGCCACCAAGGGC
52:
EEDSATHIKFSKRDEDGKELAGATMELRDSSGKTISTWISDGQVKDFYLYPGKYTFVE
TAAPDGYEVATAITFTVNEQGQVTVNGKATKG
53:
GTGACCACCCTGAGCGGCCTGAGCGGCGAGCAGGGCCCCAGCGGCGACATGACC
ACCGAGGAGGACAGCGCCACCCACATCAAGTTCAGCAAGAGAGACGAGGACGGC
AGAGAGCTGGCCGGCGCCACCATGGAGCTGAGAGACAGCAGCGGCAAGACCATC
AGCACCTGGATCAGCGACGGCCACGTGAAGGACTTCTACCTGTACCCCGGCAAGT
ACACCTTCGTGGAGACCGCCGCCCCCGACGGCTACGAGGTGGCCACCGCCATCAC
CTTCACCGTGAACGAGCAGGGCCAGGTGACCGTGAACGGCGAGGCCACCAAGGG
CGACGCCCACACC
54:
VTTLSGLSGEQGPSGDMTTEEDSATHIKFSKRDEDGRELAGATMELRDSSGKTISTWIS
DGHVKDFYLYPGKYTFVETAAPDGYEVATAITFTVNEQGQVTVNGEATKGDAHT
55:
AAGCCCCTGAGAGGCGCCGTGTTCAGCCTGCAGAAGCAGCACCCCGACTACCCCG
ACATCTACGGCGCCATCGACCAGAACGGCACCTACCAGAACGTGAGAACCGGCG
AGGACGGCAAGCTGACCTTCAAGAACCTGAGCGACGGCAAGTACAGACTGTTCG
AGAACAGCGAGCCCGCCGGCTACAAGCCCGTGCAGAACAAGCCCATCGTGGCCTT
CCAGATCGTGAACGGCGAGGTGAGAGACGTGACCAGCATCGTGCCCCAGGACAT
CCCCGCCACCTACGAGTTCACCAACGGCAAGCACTACATCACCAACGAGCCCATC
CCCCCCAAG
56:
KPLRGAVFSLQKQHPDYPDIYGAIDQNGTYQNVRTGEDGKLTFKNLSDGKYRLFENS
EPAGYKPVONKPIVAFQIVNGEVRDVTSIVPQDIPATYEFTNGKHYITNEPIPPK
57:
GGCAGCCACATGAAGCCCCTGAGAGGCGCCGTGTTCAGCCTGCAGAAGCAGCACC
CCGACTACCCCGACATCTACGGCGCCATCGACCAGAACGGCACCTACCAGAACGT
GAGAACCGGCGAGGACGGCAAGCTGACCTTCAAGAACCTGAGCGACGGCAAGTA
CAGACTGTTCGAGAACAGCGAGCCCGCCGGCTACAAGCCCGTGCAGAACAAGCC
CATCGTGGCCTTCCAGATCGTGAACGGCGAGGTGAGAGACGTGACCAGCATCGTG
CCCCAGGACATCCCCGCCACCTACGAGTTCACCAACGGCAAGCACTACATCACCA
ACGAGCCCATCCCCCCCAAG
58:
GSHMKPLRGAVFSLQKQHPDYPDIYGAIDQNGTYQNVRTGEDGKLTFKNLSDGKYR
LFENSEPAGYKPVQNKPIVAFQIVNGEVRDVTSIVPQDIPATYEFTNGKHYITNEPIPPK
59:
AGCAGCGGCCTGGTGCCCAGAGGCAGCCACATGGCCAGCATGACCGGCGGCCAG
CAGATGGGCAGAGGCAGCAGCGGCCTGAGCGGCGAGACCGGCCAGAGCGGCAAC
ACCACCATCGAGGAGGACAGCACCACCCACGTGAAGTTCAGCAAGAGAGACGCC
AACGGCAAGGAGCTGGCCGGCGCCATGATCGAGCTGAGAAACCTGAGCGGCCAG
ACCATCCAGAGCTGGATCAGCGACGGCACCGTGAAGGTGTTCTACCTGATGCCCG
GCACCTACCAGTTCGTGGAGACCGCCGCCCCCGAGGGCTACGAGCTGGCCGCCCC
CATCACCTTCACCATCGACGAGAAGGGCCAGATCTGGGTGGACAGC
60:
SSGLVPRGSHMASMTGGQQMGRGSSGLSGETGQSGNTTIBEDSTTHVKFSKRDANGK
ELAGAMIELRNLSGQTIQSWISDGTVKVFYLMPGTYQFVETAAPEGYELAAPITFTIDE
KGQIWVDS
61: GCCCACATCGTGATGGTGGACGCCTACAAGCCCACCAAG
62: AHIVMVDAYKPTK
63: AAGCTGGGCGACATCGAGTTCATCAAGGTGAACAAG
64: KLGDIEFIKVNK
65: GACCCCATCGTGATGATCGACAACGACAAGCCCATCACC
66: DPIVMIDNDKPIT

TABLE 2
Preferred VLM which may be used as a VLM or used for the production of
chimeric VLM*

SEQ ID NO: Sequence; Source
67:
ATGGTGTTGCTGAGAGTGTTAATTCTGCTCCTCTCCTGGGCGGGGGGATGGGAG
GTCAGTATGGGAATCCTTTAAATAAATATATCAGACATTATGAAGGATTATCTTAC
AATGTGGATTCATTACACCAAAAACACCAGCGTGCCAAAAGAGCAGTCTCACATG
AAGACCAATTTTTACGTCTAGATTTCCATGCCCATGGAAGACATTTCAACCTACGA
ATGAAGAGGGACACTTCCCTTTTCAGTGATGAATTTAAAGTAGAAACATCAAATA
AAGTACTTGATTATGATACCTCTCATATTTACACTGGACATATTTATGGTGAAGAA
GGAAGTTTTAGCCATGGGTCTGTTATTGATGGAAGATTTGAAGGATTCATCCAGA
CTCGTGGTGGCACATTTTATGTTGAGCCAGCAGAGAGATATATTAAAGACCGAAC
TCTGCCATTTCACTCTGTCATTTATCATGAAGATGATATTAACTATCCCCATAAAT
ACGGTCCTCAGGGGGGCTGTGCAGATCATTCAGTATTTGAAAGAATGAGGAAATA
CCAGATGACTGGTGTAGAGGAAGTAACACAGATACCTCAAGAAGAACATGCTGCT
AATGGTCCAGAACTTCTGAGGAAAAAACGTACAACTTCAGCTGAAAAAAATACTT
GTCAGCTTTATATTCAGACTGATCATTTGTTCTTTAAATATTACGGAACACGAGAA
GCTGTGATTGCCCAGATATCCAGTCATGTTAAAGCGATTGATACAATTTACCAGAC
CACAGACTTCTCCGGAATCCGTAACATCAGTTTCATGGTGAAACGCATAAGAATC
AATACAACTGCTGATGAGAAGGACCCTACAAATCCTTTCCGTTTCCCAAATATTGG
TGTGGAGAAGTTTCTGGAATTGAATTCTGAGCAGAATCATGATGACTACTGTTTGG
CCTATGTCTTCACAGACCGAGATTTTGATGATGGCGTACTTGGTCTGGCTTGGGTT
GGAGCACCTTCAGGAAGCTCTGGAGGAATATGTGAAAAAAGTAAACTCTATTCAG
ATGGTAAGAAGAAGTCCTTAAACACTGGAATTATTACTGTTCAGAACTATGGGTC
TCATGTACCTCCCAAAGTCTCTCACATTACTTTTGCTCACGAAGTTGGACATAACT
TTGGATCCCCACATGATTCTGGAACAGAGTGCACACCAGGAGAATCTAAGAATTT
GGGTCAAAAAGAAAATGGCAATTACATCATGTATGCAAGAGCAACATCTOGOGA
CAAACTTAACAACAATAAATTCTCACTCTGTAGTATTAGAAATATAAGCCAAGTT
CTTGAGAAGAAGAGAAACAACTGTTTTGTTGAATCTGGCCAACCTATTTGTGGAA
ATGGAATGGTAGAACAAGGTGAAGAATGTGATTGTGGCTATAGTGACCAGTGTAA
AGATGAATGCTGCTTCGATGCAAATCAACCAGAGGGAAGAAAATGCAAACTGAA
ACCTGGGAAACAGTGCAGTCCAAGTCAAGGTCCTTGTTGTACAGCACAGTGTGCA
TTCAAGTCAAAGTCTGAGAAGTGTCGGGATGATTCAGACTGTGCAAGGGAAGGAA
TATGTAATGGCTTCACAGCTCTCTGCCCAGCATCTGACCCTAAACCAAACTTCACA
GACTGTAATAGGCATACACAAGTGTGCATTAATGGGCAATGTGCAGGTTCTATCT
GTGAGAAATATGGCTTAGAGGAGTGTACGTGTGCCAGTTCTGATGGCAAAGATGA
TAAAGAATTATGCCATGTATGCTGTATGAAGAAAATGGACCCATCAACTTGTGCC
AGTACAGGGTCTGTGCAGTGGAGTAGGCACTTCAGTGGTCGAACCATCACCCTGC
AACCTGGATCCCCTTGCAACGATTTTAGAGGTTACTGTGATGTTTTCATGCGGTGC
AGATTAGTAGATGCTGATGGTCCTCTAGCTAGGCTTAAAAAAGCAATTTTTAGTCC
AGAGCTCTATGAAAACATTGCTGAATGGATTGTGGCTCATTGGTGGGCAGTATTA
CTTATGGGAATTGCTCTGATCATGCTAATGGCTGGATTTATTAAGATATGCAGTGT
TCATACTCCAAGTAGTAATCCAAAGTTGCCTCCTCCTAAACCACTTCCAGGCACTT
TAAAGAGGAGGAGACCTCCACAGCCCATTCAGCAACCCCAGCGTCAGCGGCCCCG
AGAGAGTTATCAAATGGGACACATGAGACGCTAA; Transcript ID
ENST00000260408; Homo sapiens
68:
MVLLRVLILLLSWAAGMGGQYGNPLNKYIRHYEGLSYNVDSLHQKHQRAKRAVSHE
DQFLRLDFHAHGRHFNLRMKRDTSLFSDEFKVETSNKVLDYDTSHIYTGHIYGEEGSF
SHGSVIDGRFEGFIQTRGGTFYVEPAERYIKDRTLPFHSVIYHEDDINYPHKYGPQGGC
ADHSVFERMRKYQMTGVEEVTQIPQEEHAANGPELLRKKRTTSAEKNTCQLYIQTDH
LFFKYYGTREAVIAQISSHVKAIDTIYQTTDFSGIRNISFMVKRIRINTTADEKDPTNPFR
FPNIGVEKFLELNSEQNHDDYCLAYVFTDRDFDDGVLGLAWVGAPSGSSGGICEKSK
LYSDGKKKSLNTGIITVQNYGSHVPPKVSHITFAHEVGHNFGSPHDSGTECTPGESKNL
GQKENGNYIMYARATSGDKLNNNKFSLCSIRNISQVLEKKENNCFVESGQPICGNGM
VEQGEECDCGYSDQCKDECCFDANQPEGRKCKLKPGKQCSPSQGPCCTAQCAFKSKS
EKCRDDSDCAREGICNGFTALCPASDPKPNFTDCNRHTQVCINGQCAGSICEKYGLEE
CTCASSDGKDDKELCHVCCMKKMDPSTCASTGSVQWSRHFSGRTITLQPGSPCNDFR
GYCDVFMRCRLVDADGPLARLKKAIFSPELYENIAEWIVAHWWAVLLMGIALIMLM
AGFIKICSVHTPSSNPKLPPPKPLPGTLKRRRPPQPIQQPQRQRPRESYQMGHMRR;
ADAM10 protein (ENSP00000260408) encoded by Transcript ID ENST00000260408
from Gene ID ENSG00000137845; Homo sapiens
69:
ATGGAATCCAAGGGGGCCAGTTCCTGCCGTCTGCTCTTCTGCCTCTTGATCTCCGC
CACCGTCTTCAGGCCAGGCCTTGGATGGTATACTGTAAATTCAGCATATGGAGAT
ACCATTATCATACCTTGCCGACTTGACGTACCTCAGAATCTCATGTTTGGCAAATG
GAAATATGAAAAGCCCGATGGCTCCCCAGTATTTATTGCCTTCAGATCCTCTACAA
AGAAAAGTGTGCAGTACGACGATGTACCAGAATACAAAGACAGATTGAACCTCTC
AGAAAACTACACTTTGTCTATCAGTAATGCAAGGATCAGTGATGAAAAGAGATTT
GTGTGCATGCTAGTAACTGAGGACAACGTGTTTGAGGCACCTACAATAGTCAAGG
TGTTCAAGCAACCATCTAAACCTGAAATTGTAAGCAAAGCACTGTTTCTCGAAAC
AGAGCAGCTAAAAAAGTTGGGTGACTGCATTTCAGAAGACAGTTATCCAGATGGC
AATATCACATGGTACAGGAATGGAAAAGTGCTACATCCCCTTGAAGGAGCGGTGG
TCATAATTTTTAAAAAGGAAATGGACCCAGTGACTCAGCTCTATACCATGACTTCC
ACCCTGGAGTACAAGACAACCAAGGCTGACATACAAATGCCATTCACCTGCTCGG
TGACATATTATGGACCATCTGGCCAGAAAACAATTCATTCTGAACAGGCAGTATT
TGATATTTACTATCCTACAGAGCAGGTGACAATACAAGTGCTGCCACCAAAAAAT
GCCATCAAAGAAGGGGATAACATCACTCTTAAATGCTTAGGGAATGGCAACCCTC
CCCCAGAGGAATTTTTGTTTTACTTACCAGGACAGCCCGAAGGAATAAGAAGCTC
AAATACTTACACACTGACGGATGTGAGGCGCAATGCAACAGGAGACTACAAGTGT
TCCCTGATAGACAAAAAAAGCATGATTGCTTCAACAGCTATCACAGTTCACTATTT
GGATTTGTCCTTAAACCCAAGTGGAGAAGTGACTAGACAGATTGGTGATGCCCTA
CCCGTGTCATGCACAATATCTGCTAGCAGGAATGCAACTGTGGTATGGATGAAAG
ATAACATCAGGCTTCGATCTAGCCCGTCATTTTCTAGTCTTCATTATCAGGATGCT
GGAAACTATGTCTGCGAAACTGCTCTGCAGGAGGTTGAAGGACTAAAGAAAAGA
GAGTCATTGACTCTCATTGTAGAAGGCAAACCTCAAATAAAAATGACAAAGAAAA
CTGATCCCAGTGGACTATCTAAAACAATAATCTGCCATGTGGAAGGTTTTOCAAA
GCCAGCCATTCAATGGACAATTACTGGCAGTGGAAGCGTCATAAACCAAACAGAG
GAATCTCCTTATATTAATGGCAGGTATTATAGTAAAATTATCATTTCCCCTGAAGA
GAATGTTACATTAACTTGCACAGCAGAAAACCAACTGGAGAGAACAGTAAACTCC
TTGAATGTCTCTGCTATAAGTATTCCAGAACACGATGAGGCAGACGAGATAAGTG
ATGAAAACAGAGAAAAGGTGAATGACCAGGCAAAACTAATTGTGGGAATOGTTG
TTGGTCTCCTCCTTGCTGCCCTTGTTGCTGGTGTCGTCTACTGGCTGTACATGAAGA
AGTCAAAGACTGCATCAAAACATGTAAACAAGGACCTCGGTAATATGGAAGAAA
ACAAAAAGTTAGAAGAAAACAATCACAAAACTGAAGCCTAA; Transcript ID
ENST00000306107; Homo sapiens
70;
MESKGASSCRLLFCLLISATVFRPGLGWYTVNSAYGDTIIIPCRLDVPQNLMFGKWKY
EKPDGSPVFIAFRSSTKKSVQYDDVPEYKDRLNLSENYTLSISNARISDEKRFVCMLVT
EDNVFEAPTIVKVFKQPSKPEIVSKALFLETEQLKKLGDCISEDSYPDGNITWYRNGKV
LHPLEGAVVIIFKKEMDPVTQLYTMTSTLEYKTTKADIQMPFTCSVTYYGPSGQKTTH
SEQAVFDIYYPTEQVTIQVLPPKNAIKEGDNITLKCLGNGNPPPEEFLFYLPGQPEGIRS
SNTYTLTDVRRNATGDYKCSLIDKKSMIASTAITVHYLDLSLNPSGEVTRQIGDALPVS
CTISASRNATVVWMKDNIRLRSSPSFSSLHYQDAGNYVCETALQEVEGLKKRESLTLI
VEGKPQIKMTKKTDPSGLSKTIICHVEGFPKPAIQWTITGSGSVINQTEESPYINGRYYS
KIIISPEENVTLTCTAENQLERTVNSLNVSAISIPEHDEADEISDENREKVNDQAKLIVGI
VVGLLLAALVAGVVYWLYMKKSKTASKHVNKDLGNMEENKKLEENNHKTEA;
ALCAM protein (ENSP00000305988) encoded by Transcript ID ENST00000306107
from Gene ID ENSG00000170017; Homo sapiens
71:
ATGGAATCCAAGGGGGCCAGTTCCTGCCGTCTGCTCTTCTGCCTCTTGATCTCCGC
CACCGTCTTCAGGCCAGGCCTTGGATGGTATACTGTAAATTCAGCATATGGAGAT
ACCATTATCATACCTTGCCGACTTGACGTACCTCAGAATCTCATGTTTGGCAAATG
GAAATATGAAAAGCCCGATGGCTCCCCAGTATTTATTGCCTTCAGATCCTCTACAA
AGAAAAGTGTGCAGTACGACGATGTACCAGAATACAAAGACAGATTGAACCTCTC
AGAAAACTACACTTTGTCTATCAGTAATGCAAGGATCAGTGATGAAAAGAGATTT
GTGTGCATGCTAGTAACTGAGGACAACGTGTTTGAGGCACCTACAATAGTCAAGG
TGTTCAAGCAACCATCTAAACCTGAAATTGTAAGCAAAGCACTGTTTCTCGAAAC
AGAGCAGCTAAAAAAGTTGGGTGACTGCATTTCAGAAGACAGTTATCCAGATGGC
AATATCACATGGTACAGGAATGGAAAAGTGCTACATCCCCTTGAAGGAGCGGTGG
TCATAATTTTTAAAAAGGAAATGGACCCAGTGACTCAGCTCTATACCATGACTTCC
ACCCTGGAGTACAAGACAACCAAGGCTGACATACAAATGCCATTCACCTGCTCGG
TGACATATTATGGACCATCTGGCCAGAAAACAATTCATTCTGAACAGGCAGTATT
TGATATTTACTATCCTACAGAGCAGGTGACAATACAAGTGCTGCCACCAAAAAAT
GCCATCAAAGAAGGGGATAACATCACTCTTAAATGCTTAGGGAATGGCAACCCTC
CCCCAGAGGAATTTTTGTTTTACTTACCAGGACAGCCCGAAGGAATAAGAAGCTC
AAATACTTACACACTGACGGATGTGAGGCGCAATGCAACAGGAGACTACAAGTGT
TCCCTGATAGACAAAAAAAGCATGATTGCTTCAACAGCTATCACAGTTCACTATTT
GGATTTGTCCTTAAACCCAAGTGGAGAAGTGACTAGACAGATTGGTGATGCCCTA
CCCGTGTCATGCACAATATCTGCTAGCAGGAATGCAACTGTGGTATGGATGAAAG
ATAACATCAGGCTTCGATCTAGCCCGTCATTTTCTAGTCTTCATTATCAGGATGCT
GGAAACTATGTCTGCGAAACTGCTCTGCAGGAGGTTGAAGGACTAAAGAAAAGA
GAGTCATTGACTCTCATTGTAGAAGGCAAACCTCAAATAAAAATGACAAAGAAAA
CTGATCCCAGTGGACTATCTAAAACAATAATCTGCCATGTGGAAGGTTTTCCAAA
GCCAGCCATTCAATGGACAATTACTGGCAGTGGAAGCGTCATAAACCAAACAGAG
GAATCTCCTTATATTAATGGCAGGTATTATAGTAAAATTATCATTTCCCCTGAAGA
GAATGTTACATTAACTTGCACAGCAGAAAACCAACTGGAGAGAACAGTAAACTCC
TTGAATGTCTCTGCTAATGAAAACAGAGAAAAGGTGAATGACCAGGCAAAACTA
ATTGTGGGAATCGTTGTTGGTCTCCTCCTTGCTGCCCTTGTTGCTGGTGTCGTCTAC
TGGCTGTACATGAAGAAGTCAAAGACTGCATCAAAACATGTAAACAAGGACCTCG
GTAATATGGAAGAAAACAAAAAGTTAGAAGAAAACAATCACAAAACTGAAGCCT
AA; Transcript ID ENST00000472644; Homo sapiens
72:
MESKGASSCRLLFCLLISATVFRPGLGWYTVNSAYGDTIIIPCRLDVPQNLMFGKWKY
EKPDGSPVFIAFRSSTKKSVQYDDVPEYKDRLNLSENYTLSISNARISDEKRFVCMLVT
EDNVFEAPTIVKVFKQPSKPEIVSKALFLETEQLKKLGDCISEDSYPDGNITWYRNGKV
LHPLEGAVVIIFKKEMDPVTQLYTMTSTLEYKTTKADIQMPFTCSVTYYGPSGQKTIH
SEQAVFDIYYPTEQVTIQVLPPKNAIKEGDNITLKCLGNGNPPPEEFLFYLPGQPEGIRS
SNTYTLTDVRRNATGDYKCSLIDKKSMIASTAITVHYLDLSLNPSGEVTRQIGDALPVS
CTISASRNATVVWMKDNIRLRSSPSFSSLHYQDAGNYVCETALQEVEGLKKRESLTLI
VEGKPQIKMTKKTDPSGLSKTIICHVEGFPKPAIQWTITGSGSVINQTEESPYINGRYYS
KIIISPEENVTLTCTAENQLERTVNSLNVSANENREKVNDQAKLIVGIVVGLLLAALVA
GVVYWLYMKKSKTASKHVNKDLGNMEENKKLEENNHKTEA; ALCAM protein
(ENSP00000419236) encoded by Transcript ID ENST00000472644 from Gene ID
ENSG00000170017; Homo sapiens
73:
ATGCTGCGCCGCCCCGCTCCCGCGCTGGCCCCGGCCGCCCGGCTGCTGCTGGCCG
GGCTGCTGTGCGGCGGCGGGGTCTGGGCCGCGCGAGTTAACAAGCACAAGCCCTG
GCTGGAGCCCACCTACCACGGCATAGTCACAGAGAACGACAACACCGTGCTCCTC
GACCCCCCACTGATCGCGCTGGATAAAGATGCGCCTCTGCGATTTGCAGGTGAGA
TTTGTGGATTTAAAATTCACGGGCAGAATGTCCCCTTTGATGCAGTGGTAGTGGAT
AAATCCACTGGTGAGGGAGTCATTCGCTCCAAAGAGAAACTGGACTGTGAGCTGC
AGAAAGACTATTCATTCACCATCCAGGCCTATGATTGTGGGAAGGGACCTGATGG
CACCAACGTGAAAAAGTCTCATAAAGCAACTGTTCATATTCAGGTGAACGACGTG
AATGAGTACGCGCCCGTGTTCAAGGAGAAGTCCTACAAAGCCACGGTCATCGAGG
GGAAGCAGTACGACAGCATTTTGAGGGTGGAGGCCGTGGATGCCGACTGCTCCCC
TCAGTTCAGCCAGATTTGCAGCTACGAAATCATCACTCCAGACGTGCCCTTTACTG
TTGACAAAGATGGTTATATAAAAAACACAGAGAAATTAAACTACGGGAAAGAAC
ATCAATATAAGCTGACCGTCACTGCCTATGACTGTGGGAAGAAAAGAGCCACAGA
AGATGTTTTGGTGAAGATCAGCATTAAGCCCACCTGCACCCCTGGGTGGCAAGGA
TGGAACAACAGGATTGAGTATGAGCCGGGCACCGGCGCGTTGGCCGTCTTTCCAA
ATATCCACCTGGAGACATGTGACGAGCCAGTCGCCTCAGTACAGGCCACAGTGGA
GCTAGAAACCAGCCACATAGGGAAAGGCTGCGACCGAGACACCTACTCAGAGAA
GTCCCTCCACCGGCTCTGTGGTGCGGCCGCGGGCACTGCCGAGCTGCTGCCATCCC
CGAGTGGATCCCTCAACTGGACCATGGGCCTGCCCACCGACAATGGCCACGACAG
CGACCAGGTGTTTGAGTTCAACGGCACCCAGGCAGTGAGGATCCCGGATGGCGTC
GTGTCGGTCAGCCCCAAAGAGCCGTTCACCATCTCGGTGTGGATGAGACATGGGC
CATTCGGCAGGAAGAAGGAGACAATTCTTTGCAGTTCTGATAAAACAGATATGAA
TCGGCACCACTACTCCCTCTATGTCCACGGGTGCCGGCTGATCTTCCTCTTCCGTC
AGGATCCTTCTGAGGAGAAGAAATACAGACCTGCAGAGTTCCACTGGAAGTTGAA
TCAGGTCTGTGATGAGGAATGGCACCACTACGTCCTCAATGTAGAATTCCCGAGT
GTGACTCTCTATGTGGATGGCACGTCCCACGAGCCCTTCTCTGTGACTGAGGATTA
CCCGCTCCATCCATCCAAGATAGAAACTCAGCTCGTGGTGGGGGCTTGCTGGCAA
GAGTTTTCAGGAGTTGAAAATGACAATGAAACTGAGCCTGTGACTGTGGCCTCTG
CAGGTGGCGACCTGCACATGACCCAGTTTTTCCGAGGCAATCTGGCTGGCTTAACT
CTCCGTTCCGGGAAACTCGCGGATAAGAAGGTGATCGACTGTCTGTATACCTGCA
AGGAGGGGCTGGACCTGCAGGTCCTCGAAGACAGTGGCAGAGGCGTGCAGATCC
AAGCACACCCCAGCCAGITGGTATTGACCTTGGAGGGAGAAGACCTCGGGGAATT
GGATAAGGCCATGCAGCACATCTCGTACCTGAACTCCCGGCAGTTCCCCACGCCC
GGAATTCGCAGACTCAAAATCACCAGCACAATCAAGTGTTTTAACGAGGCCACCT
GCATTTCGGTCCCCCCGGTAGATGGCTACGTGATGGTITTACAGCCCGAGGAGCC
CAAGATCAGCCTGAGTGGCGTCCACCATTTTGCCCGAGCAGCTTCTGAATTTGAA
AGCTCAGAAGGGGTGTTCCTTTTCCCTGAGCTTCGCATCATCAGCACCATCACGAG
AGAAGTGGAGCCTGAAGGGGACGGGGCTGAGGACCCCACAGTTCAAGAATCACT
GGTGTCCGAGGAGATCGTGCACGACCTGGATACCTGTGAGGTCACGGTGGAGGGA
GAGGAGCTGAACCACGAGCAGGAGAGCCTGGAGGTGGACATGGCCCGCCTGCAG
CAGAAGGGCATTGAAGTGAGCAGCTCTGAACTGGGCATGACCTTCACAGGCGTGG
ACACCATGGCCAGCTACGAGGAGGTTTTGCACCTGCTGCGCTATCGGAACTGGCA
TGCCAGGTCCTTGCTTGACCGGAAGTTTAAGCTCATCTGCTCAGAGCTGAATGGCC
GCTACATCAGCAACGAATTTAAGGTGGAGGTGAATGTAATCCACACGGCCAACCC
CATGGAACACGCCAACCACATGGCTGCCCAGCCACAGTTCGTGCACCCGGAACAC
CGCTCCTTTGTTGACCTGTCAGGCCACAACCTGGCCAACCCCCACCCGTTCGCAGT
CGTCCCCAGCACTGCGACAGTIGTGATCGTGGTGTGCGTCAGCTTCCTGGTGTTCA
TGATTATCCTGGGGGTATTTCGGATCCGGGCCGCACATCGGCGGACCATGCGGGA
TCAGGACACCGGGAAGGAGAACGAGATGGACTGGGACGACTCTGCCCTGACCAT
CACCGTCAACCCCATGGAGACCTATGAGGACCAGCACAGCAGTGAGGAGGAGGA
GGAAGAGGAAGAGGAAGAGGAAAGCGAGGACGGCGAAGAAGAGGATGACATCA
CCAGCGCCGAGTCGGAGAGCAGCGAGGAGGAGGAGGGGGAGCAGGGCGACCCC
CAGAACGCAACCCGGCAGCAGCAGCTGGAGTGGGATGACTCCACCCTCAGCTACT
GA; Transcript ID ENST00000361311; Homo sapiens
74:
MLRRPAPALAPAARLLLAGLLCGGGVWAARVNKHKPWLEPTYHGIVTENDNTVLLD
PPLIALDKDAPLRFAGEICGFKIHGQNVPFDAVVVDKSTGEGVIRSKEKLDCELQKDY
SFTIQAYDCGKGPDGTNVKKSHKATVHIQVNDVNEYAPVFKEKSYKATVIEGKQYDS
ILRVEAVDADCSPQFSQICSYELITPDVPFTVDKDGYIKNTEKLNYGKEHQYKLTVTAY
DCGKKRATEDVLVKISIKPTCTPGWQGWNNRIEYEPGTGALAVFPNIHLETCDEPVAS
VQATVELETSHIGKGCDRDTYSEKSLHRLCGAAAGTAELLPSPSGSLNWTMGLPTDN
GHDSDQVFEFNGTQAVRIPDGVVSVSPKEPFTISVWMRHGPFGRKKETILCSSDKTDM
NRHHYSLYVHGCRLIFLFRQDPSEEKKYRPAEFHWKLNQVCDEEWHHYVLNVEFPSV
TLYVDGTSHEPFSVTEDYPLHPSKIETQLVVGACWQEFSGVENDNETEPVTVASAGG
DLHMTQFFRGNLAGLTLRSGKLADKKVIDCLYTCKEGLDLQVLEDSGRGVQIQAHPS
QLVLTLEGEDLGELDKAMQHISYLNSRQFPTPGIRRLKITSTIKCFNEATCISVPPVDGY
VMVLQPEEPKISLSGVHHFARAASEFESSEGVFLFPELRIISTITREVEPEGDGAEDPTV
QESLVSEEIVHDLDTCEVTVEGEELNHEQESLEVDMARLQQKGIEVSSSELGMTFTGV
DTMASYEEVLHLLRYRNWHARSLLDRKFKLICSELNGRYISNEFKVEVNVIHTANPM
EHANHMAAQPQFVHPEHRSFVDLSGHNLANPHPFAVVPSTATVVIVVCVSFLVFMIIL
GVFRIRAAHRRTMRDQDTGKENEMDWDDSALTITVNPMETYEDQHSSEEEEEEEEEE
ESEDGEEEDDITSAESESSEEEEGEQGDPQNATRQQQLEWDDSTLSY; CLSTN1 protein
(ENSP00000354997) encoded by Transcript ID ENST00000361311 from Gene ID
ENSG00000171603; Homo sapiens
75:
ATGCTGCGCCGCCCCGCTCCCGCGCTGGCCCCGGCCGCCCGGCTGCTGCTGGCCG
GGCTGCTGTGCGGCGGGGGGGTCTGGGCCGCGCGAGTTAACAAGCACAAGCCCTG
GCTGGAGCCCACCTACCACGGCATAGTCACAGAGAACGACAACACCGTGCTCCTC
GACCCCCCACTGATCGCGCTGGATAAAGATGCGCCTCTGCGATTTGCAGAGAGTT
TTGAGGTGACAGTCACCAAAGAAGGTGAGATTTGTGGATTTAAAATTCACGGGCA
GAATGTCCCCTTTGATGCAGTGGTAGTGGATAAATCCACTGGTGAGGGAGTCATT
CGCTCCAAAGAGAAACTGGACTGTGAGCTGCAGAAAGACTATTCATTCACCATCC
AGGCCTATGATTGTGGGAAGGGACCTGATGGCACCAACGTGAAAAAGTCTCATAA
AGCAACTGTTCATATTCAGGTGAACGACGTGAATGAGTACGCGCCCGTGTTCAAG
GAGAAGTCCTACAAAGCCACGGTCATCGAGGGGAAGCAGTACGACAGCATTTTG
AGGGTGGAGGCCGTGGATGCCGACTGCTCCCCTCAGTTCAGCCAGATTTGCAGCT
ACGAAATCATCACTCCAGACGTGCCCTTTACTGTTGACAAAGATGGTTATATAAA
AAACACAGAGAAATTAAACTACGGGAAAGAACATCAATATAAGCTGACCGTCAC
TGCCTATGACTGTGGGAAGAAAAGAGCCACAGAAGATGTTTTGGTGAAGATCAGC
ATTAAGCCCACCTGCACCCCTGGGTGGCAAGGATGGAACAACAGGATTGAGTATG
AGCCGGGCACCGGCGCGTTGGCCGTCTTTCCAAATATCCACCTGGAGACATGTGA
CGAGCCAGTCGCCTCAGTACAGGCCACAGTGGAGCTAGAAACCAGCCACATAGG
GAAAGGCTGCGACCGAGACACCTACTCAGAGAAGTCCCTCCACCGGCTCTGTGGT
GCGGCCGCGGGCACTGCCGAGCTGCTGCCATCCCCGAGTGGATCCCTCAACTGGA
CCATGGGCCTGCCCACCGACAATGGCCACGACAGCGACCAGGTGTTTGAGTTCAA
CGGCACCCAGGCAGTGAGGATCCCGGATGGCGTCGTGTCGGTCAGCCCCAAAGAG
CCGTTCACCATCTCGGTGTGGATGAGACATGGGCCATTCGGCAGGAAGAAGGAGA
CAATTCTTTGCAGTTCTGATAAAACAGATATGAATCGGCACCACTACTCCCTCTAT
GTCCACGGGTGCCGGCTGATCTTCCTCTTCCGTCAGGATCCTTCTGAGGAGAAGAA
ATACAGACCTGCAGAGTTCCACTGGAAGTTGAATCAGGTCTGTGATGAGGAATGG
CACCACTACGTCCTCAATGTAGAATTCCCGAGTGTGACTCTCTATGTGGATGGCAC
GTCCCACGAGCCCTTCTCTGTGACTGAGGATTACCCGCTCCATCCATCCAAGATAG
AAACTCAGCTCGTGGTGGGGGCTTGCTGGCAAGAGTTTTCAGGAGTTGAAAATGA
CAATGAAACTGAGCCTGTGACTGTGGCCTCTGCAGGTGGCGACCTGCACATGACC
CAGTTTTTCCGAGGCAATCTGGCTGGCTTAACTCTCCGTTCCGGGAAACTCGCGGA
TAAGAAGGTGATCGACTGTCTGTATACCTGCAAGGAGGGGCTGGACCTGCAGGTC
CTCGAAGACAGTGGCAGAGGCGTGCAGATCCAAGCACACCCCAGCCAGTTGGTAT
TGACCTTGGAGGGAGAAGACCTCGGGGAATTGGATAAGGCCATGCAGCACATCTC
GTACCTGAACTCCCGGCAGTTCCCCACGCCCGGAATTCGCAGACTCAAAATCACC
AGCACAATCAAGTGTTTTAACGAGGCCACCTGCATTTCGGTCCCCCCGGTAGATG
GCTACGTGATGGTTTTACAGCCCGAGGAGCCCAAGATCAGCCTGAGTGGCGTCCA
CCATTTTGCCCGAGCAGCTTCTGAATTTGAAAGCTCAGAAGGGGTGTTCCTTTTCC
CTGAGCTTCGCATCATCAGCACCATCACGAGAGAAGTGGAGCCTGAAGGGGACG
GGGCTGAGGACCCCACAGTTCAAGAATCACTGGTGTCCGAGGAGATCGTGCACGA
CCTGGATACCTGTGAGGTCACGGTGGAGGGAGAGGAGCTGAACCACGAGCAGGA
GAGCCTGGAGGTGGACATGGCCCGCCTGCAGCAGAAGGGCATTGAAGTGAGCAG
CTCTGAACTGGGCATGACCTTCACAGGCGTGGACACCATGGCCAGCTACGAGGAG
GTTTTGCACCTGCTGCGCTATCGGAACTGGCATGCCAGGTCCTTGCTTGACCGGAA
GTTTAAGCTCATCTGCTCAGAGCTGAATGGCCGCTACATCAGCAACGAATTTAAG
GTGGAGGTGAATGTAATCCACACGGCCAACCCCATGGAACACGCCAACCACATGG
CTGCCCAGCCACAGTTCGTGCACCCGGAACACCGCTCCTTTGTTGACCTGTCAGGC
CACAACCTGGCCAACCCCCACCCGTTCGCAGTCGTCCCCAGCACTGCGACAGTTG
TGATCGTGGTGTGCGTCAGCTTCCTGGTGTTCATGATTATCCTGGGGGTATTTCGG
ATCCGGGCCGCACATCGGCGGACCATGCGGGATCAGGACACCGGGAAGGAGAAC
GAGATGGACTGGGACGACTCTGCCCTGACCATCACCGTCAACCCCATGGAGACCT
ATGAGGACCAGCACAGCAGTGAGGAGGAGGAGGAAGAGGAAGAGGAAGAGGAA
AGCGAGGACGGCGAAGAAGAGGATGACATCACCAGCGCCGAGTCGGAGAGCAGC
GAGGAGGAGGAGGGGGAGCAGGGCGACCCCCAGAACGCAACCCGGCAGCAGCA
GCTGGAGTGGGATGACTCCACCCTCAGCTACTGA; Transcript ID ENST00000377298;
Homo sapiens
76:
MLRRPAPALAPAARLLLAGLLCGGGVWAARVNKHKPWLEPTYHGIVTENDNTVLLD
PPLIALDKDAPLRFAESFEVTVTKEGEICGFKIHGQNVPFDAVVVDKSTGEGVIRSKEK
LDCELQKDYSFTIQAYDCGKGPDGTNVKKSHKATVHIQVNDVNEYAPVFKEKSYKA
TVIEGKQYDSILRVEAVDADCSPQFSQICSYEIITPDVPFTVDKDGYIKNTEKLNYGKE
HQYKLTVTAYDCGKKRATEDVLVKISIKPTCTPGWQGWNNRIEYEPGTGALAVFPNI
HLETCDEPVASVQATVELETSHIGKGCDRDTYSEKSLHRLCGAAAGTAELLPSPSGSL
NWTMGLPTDNGHDSDQVFEFNGTQAVRIPDGVVSVSPKEPFTISVWMRHGPFGRKKE
TILCSSDKTDMNRHHYSLYVHGCRLIFLFRQDPSEEKKYRPAEFHWKLNQVCDEEWH
HYVLNVEFPSVTLYVDGTSHEPFSVTEDYPLHPSKIETQLVVGACWQEFSGVENDNET
EPVTVASAGGDLHMTQFFRGNLAGLTLRSGKLADKKVIDCLYTCKEGLDLQVLEDSG
RGVQIQAHPSQLVLTLEGEDLGELDKAMQHISYLNSRQFPTPGIRRLKITSTIKCFNEAT
CISVPPVDGYVMVLQPEEPKISLSGVHHFARAASEFESSEGVFLFPELRIISTITREVEPE
GDGAEDPTVQESLVSEEIVHDLDTCEVTVEGEELNHEQESLEVDMARLQQKGIEVSSS
ELGMTFTGVDTMASYEEVLHLLRYRNWHARSLLDRKFKLICSELNGRYISNEFKVEV
NVIHTANPMEHANHMAAQPQFVHPEHRSFVDLSGHNLANPHPFAVVPSTATVVIVVC
VSFLVFMIILGVFRIRAAHRRTMRDQDTGKENEMDWDDSALTITVNPMETYEDQHSS
EEEEEEEEEEESEDGEEEDDITSAESESSEEEEGEQGDPQNATRQQQLEWDDSTLSY;
CLSTN1 protein (ENSP00000366513) encoded by Transcript ID ENST00000377298
from Gene ID ENSG00000171603; Homo sapiens
77:
ATGGGCGCCCTCAGGCCCACGCTGCTGCCGCCTTCGCTGCCGCTGCTGCTGCTGCT
AATGCTAGGAATGGGATGCTGGGCCCGGGAGGTGCTGGTCCCCGAGGGGCCCTTG
TACCGCGTGGCTGGCACAGCTGTCTCCATCTCCTGCAATGTGACCGGCTATGAGG
GCCCTGCCCAGCAGAACTTCGAGTGGTTCCTGTATAGGCCCGAGGCCCCAGATAC
TGCACTGGGCATTGTCAGTACCAAGGATACCCAGTTCTCCTATGCTGTCTTCAAGT
CCCGAGTGGTGGCGGGTGAGGTGCAGGTGCAGCGCCTACAAGGTGATGCCGTGGT
GCTCAAGATTGCCCGCCTGCAGGCCCAGGATGCCGGCATTTATGAGTGCCACACC
CCCTCCACTGATACCCGCTACCTGGGCAGCTACAGCGGCAAGGTGGAGCTGAGAG
TTCTTCCAGATGTCCTCCAGGTGTCTGCTGCCCCCCCAGGGCCCCGAGGCCGCCAG
GCCCCAACCTCACCCCCACGCATGACGGTGCATGAGGGGCAGGAGCTGGCACTGG
GCTGCCTGGCGAGGACAAGCACACAGAAGCACACACACCTGGCAGTGTCCTTTGG
GCGATCTGTGCCCGAGGCACCAGTTGGGCGGTCAACTCTGCAGGAAGTGGTGGGA
ATCCGGTCAGACTTGGCCGTGGAGGCTGGAGCTCCCTATGCTGAGCGATTGGCTG
CAGGGGAGCTTCGTCTGGGCAAGGAAGGGACCGATCGGTACCGCATGGTAGTAG
GGGGTGCCCAGGCAGGGGACGCAGGCACCTACCACTGCACTGCCGCTGAGTGGAT
TCAGGATCCTGATGGCAGCTGGGCCCAGATTGCAGAGAAAAGGGCCGTCCTGGCC
CACGTGGATGTGCAGACGCTGTCCAGCCAGCTGGCAGTGACAGTGGGGCCTGGTG
AACGTCGGATCGGCCCAGGGGAGCCCTTGGAACTGCTGTGCAATGTGTCAGGGGC
ACTTCCCCCAGCAGGCCGTCATGCTGCATACTCTGTAGGTTGGGAGATGGCACCT
GCGGGGGCACCTGGGCCCGGCCGCCTGGTAGCCCAGCTGGACACAGAGGGTGTG
GGCAGCCTGGGCCCTGGCTATGAGGGCCGACACATTGCCATGGAGAAGGTGGCAT
CCAGAACATACCGGCTACGGCTAGAGGCTGCCAGGCCTGGTGATGCGGGCACCTA
CCGCTGCCTCGCCAAAGCCTATGTTCGAGGGTCTGGGACCCGGCTTCGTGAAGCA
GCCAGTGCCCGTTCCCGGCCTCTCCCTGTACATGTGCGGGAGGAAGGTGTGGTGC
TGGAGGCTGTGGCATGGCTAGCAGGAGGCACAGTGTACCGCGGGGAGACTGCCTC
CCTGCTGTGCAACATCTCTGTGCGGGGTGGCCCCCCAGGACTGCGGCTGGCCGCC
AGCTGGTGGGTGGAGCGACCAGAGGACGGAGAGCTCAGCTCTGTCCCTGCCCAGC
TGGTGGGTGGCGTAGGCCAGGATGGTGTGGCAGAGCTGGGAGTCCGGCCTGGAG
GAGGCCCTGTCAGCGTAGAGCTGGTGGGGCCCCGAAGCCATCGGCTGAGACTACA
CAGCTTGGGGCCCGAGGATGAAGGCGTGTACCACTGTGCCCCCAGCGCCTGGGTG
CAGCATGCCGACTACAGCTGGTACCAGGCGGGCAGTGCCCGCTCAGGGCCTOTTA
CAGTCTACCCCTACATGCATGCCCTGGACACCCTATTTGTGCCTCTGCTGGTGGGT
ACAGGGGGGCCCTAGTCACTGGTGCCACTGTCCTTGGTACCATCACTTGCTGCTT
CATGAAGAGGCTTCGAAAACGGTGA; Transcript ID ENST00000314485; Homo
sapiens, Transcript ID ENST00000368086; Homo sapiens, Transcript ID
ENST00000614243; Homo sapiens
78:
MGALRPTLLPPSLPLLLLLMLGMGCWAREVLVPEGPLYRVAGTAVSISCNVTGYEGP
AQQNFEWFLYRPEAPDTALGIVSTKDTQFSYAVFKSRVVAGEVQVQRLOGDAVVLKI
ARLQAQDAGIYECHTPSTDTRYLGSYSGKVELRVLPDVLQVSAAPPGPRGRQAPTSPP
RMTVHEGQELALGCLARTSTQKHTHLAVSFGRSVPEAPVGRSTLQEVVGIRSDLAVE
AGAPYAERLAAGELRLGKEGTDRYRMVVGGAQAGDAGTYHCTAAEWIQDPDGSW
AQIAEKRAVLAHVDVQTLSSQLAVTVGPGERRIGPGEPLELLCNVSGALPPAGRHAA
YSVGWEMAPAGAPGPGRLVAQLDTEGVGSLGPGYEGRHIAMEKVASRTYRLRLEAA
RPGDAGTYRCLAKAYVRGSGTRLREAASARSRPLPVHVREEGVVLEAVAWLAGGTV
YRGETASLLCNISVRGGPPGLRLAASWWVERPEDGELSSVPAQLVGGVGQDGVAELG
VRPGGGPVSVELVGPRSHRLRLHSLGPEDEGVYHCAPSAWVQHADYSWYQAGSARS
GPVTVYPYMHALDTLFVPLLVGTGVALVTGATVLGTITCCFMKRLRKR; IGSF8
protein (ENSP00000316664) encoded by Transcript ID ENST00000314485 from
Gene ID ENSG00000162729; Homo sapiens, IGSF8 protein (ENSP00000357065)
encoded by Transcript ID ENST00000368086 from Gene ID ENSG00000162729;
Homo sapiens, IGSF8 protein (ENSP00000477565) encoded by Transcript ID
ENST00000614243 from Gene ID ENSG00000162729; Homo sapiens
79:
ATGGTCCTCCTTTGGCTCACGCTGCTCCTGATCGCCCTGCCCTGTCTCCTGCAAAC
GAAGGAAGATCCAAACCCACCAATCACGAACCTAAGGATGAAAGCAAAGGCTCA
GCAGTTGACCTGGGACCTTAACAGAAATGTGACCGATATCGAGTGTGTTAAAGAC
GCCGACTATTCTATGCCGGCAGTGAACAATAGCTATTGCCAGTTTGGAGCAATTTC
CTTATGTGAAGTGACCAACTACACCGTCCGAGTGGCCAACCCACCATTCTCCACGT
GGATCCTCTTCCCTGAGAACAGTGGGAAGCCTTGGGCAGGTGCGGAGAATCTGAC
CTGCTGGATTCATGACGTGGATTTCTTGAGCTGCAGCTGGGCGGTAGGCCCGGGG
GCCCCCGCGGACGTCCAGTACGACCTGTACTTGAACGTTGCCAACAGGCGTCAAC
AGTACGAGTGTCTTCACTACAAAACGGATGCTCAGGGAACACGTATCGGGTGTCG
TTTCGATGACATCTCTCGACTCTCCAGCGGTTCTCAAAGTTOCCACATCCTGOTGC
GGGGCAGGAGCGCAGCCTTCGGTATCCCCTGCACAGATAAGTTTGTCGTCTTTTCA
CAGATTGAGATATTAACTCCACCCAACATGACTGCAAAGTGTAATAAGACACATT
CCTTTATGCACTGGAAAATGAGAAGTCATTTCAATCGCAAATTTCGCTATGAGCTT
CAGATACAAAAGAGAATGCAGCCTGTAATCACAGAACAGGTCAGAGACAGAACC
TCCTTCCAGCTACTCAATCCTGGAACGTACACAGTACAAATAAGAGCCCGGGAAA
GAGTGTATGAATTCTTGAGCGCCTGGAGCACCCCCCAGCGCTTCGAGTGCGACCA
GGAGGAGGGCGCAAACACACGTGCCTGGCGGACGTCGCTGCTGATCGCGCTGGG
GACGCTGCTGGCCCTGGTCTGTGTCTTCGTGATCTGCAGAAGGTATCTGGTGATGC
AGAGACTCTTTCCCCGCATCCCTCACATGAAAGACCCCATCGGTGACAGCTTCCA
AAACGACAAGCTGGTGGTCTGGGAGGCGGGCAAAGCCGGCCTGGAGGAGTGTCT
GGTGACTGAAGTACAGGTCGTGCAGAAAACTTGA; Transcript ID ENST00000331035;
Homo sapiens
80:
MVLLWLTLLLIALPCLLQTKEDPNPPITNLRMKAKAQQLTWDLNRNVTDIECVKDAD
YSMPAVNNSYCQFGAISLCEVTNYTVRVANPPFSTWILFPENSGKPWAGAENLTCWI
HDVDFLSCSWAVGPGAPADVQYDLYLNVANRRQQYECLHYKTDAQGTRIGCREDDI
SRLSSGSQSSHILVRGRSAAFGIPCTDKFVVFSQIEILTPPNMTAKCNKTHSFMHWKMR
SHENRKFRYELQIQKRMQPVITEQVRDRTSFQLLNPGTYTVQIRARERVYEFLSAWST
PQRFECDQEEGANTRAWRTSLLIALGTLLALVCVFVICRRYLVMQRLFPRIPHMKDPI
GDSFQNDKLVVWEAGKAGLEECLVTEVQVVQKT; IL3RA protein (ENSP00000327890)
encoded by Transcript ID ENST00000331035 from Gene ID ENSG00000185291;
Homo sapiens
81:
ATGGTCCTCCTTTGGCTCACGCTGCTCCTGATCGCCCTGCCCTGTCTOCTGCAAAC
GAAGGAAGGTGGGAAGCCTTGGGCAGGTGCGGAGAATCTGACCTGCTGGATTCAT
GACGTGGATTTCTTGAGCTGCAGCTGGGCGGTAGGCCCGGGGGCCCCCGCGGACG
TCCAGTACGACCTGTACTTGAACGTTGCCAACAGGCGTCAACAGTACGAGTGTCT
TCACTACAAAACGGATGCTCAGGGAACACGTATCGGGTGTCGTTTCGATGACATC
TCTCGACTCTCCAGCGGTTCTCAAAGTTCCCACATCCTGGTGCGGGGCAGGAGCG
CAGCCTTCGGTATCCCCTGCACAGATAAGTTTGTCGTCTTTTCACAGATTGAGATA
TTAACTCCACCCAACATGACTGCAAAGTGTAATAAGACACATTCCTTTATGCACTG
GAAAATGAGAAGTCATTTCAATCGCAAATTTCGCTATGAGCTTCAGATACAAAAG
AGAATGCAGCCTGTAATCACAGAACAGGTCAGAGACAGAACCTCCTTCCAGCTAC
TCAATCCTGGAACGTACACAGTACAAATAAGAGCCCGGGAAAGAGTGTATGAATT
CTTGAGCGCCTGGAGCACCCCCCAGCGCTTCGAGTGCGACCAGGAGGAGGGCGCA
AACACACGTGCCTGGCGGACGTCGCTGCTGATCGCGCTGGGGACGCTGCTGGCCC
TGGTCTGTGTCTTCGTGATCTGCAGAAGGTATCTGGTGATGCAGAGACTCTTTCCC
CGCATCCCTCACATGAAAGACCCCATCGGTGACAGCTTCCAAAACGACAAGCTGG
TGGTCTGGGAGGCGGGCAAAGCCGGCCTGGAGGAGTGTCTGGTGACTGAAGTAC
AGGTCGTGCAGAAAACTTGA; Transcript ID ENST00000381469; Homo sapiens
82:
MVLLWLTLLLIALPCLLQTKEGGKPWAGAENLTCWIHDVDFLSCSWAVGPGAPADV
QYDLYLNVANRRQQYECLHYKTDAQGTRIGCRFDDISRLSSGSQSSHILVRGRSAAFG
IPCTDKFVVFSQIEILTPPNMTAKCNKTHSFMHWKMRSHFNRKFRYELQIQKRMQPVI
TEQVRDRTSFQLLNPGTYTVQIRARERVYEFLSAWSTPQRFECDQEEGANTRAWRTS
LLIALGTLLALVCVFVICRRYLVMQRLFPRIPHMKDPIGDSFQNDKLVVWEAGKAGLE
ECLVTEVQVVQKT; IL3RA protein (ENSP00000370878) encoded by Transcript ID
ENST00000381469 from Gene ID ENSG00000185291; Homo sapiens
83:
ATGGGCCCCGGCCCCAGCCGCGCGCCCCGCGCCCCACGCCTGATGCTCTGTGCGC
TCGCCTTGATGGTGGCGGCCGGCGGCTGCGTCGTCTCCGCCTTCAACCTGGATACC
CGATTCCTGGTAGTGAAGGAGGCCGGGAACCCGGGCAGCCTCTTCGGCTACTCGG
TCGCCCTCCATCGGCAGACAGAGCGGCAGCAGCGCTACCTGCTCCTGGCTGGTGC
CCCCCGGGAGCTCGCTGTGCCCGATGGCTACACCAACCGGACTGGTGCTGTGTAC
CTGTGCCCACTCACTGCCCACAAGGATGACTGTGAGCGGATGAACATCACAGTGA
AAAATGACCCTGGCCATCACATTATTGAGGACATGTGGCTTGGAGTGACTGTGGC
CAGCCAGGGCCCTGCAGGCAGAGTTCTGGTCTGTGCCCACCGCTACACCCAGGTG
CTGTGGTCAGGGTCAGAAGACCAGCGGCGCATGGTGGGCAAGTGCTACGTGCGA
GGCAATGACCTAGAGCTGGACTCCAGTGATGACTGGCAGACCTACCACAACGAGA
TGTGCAATAGCAACACAGACTACCTGGAGACGGGCATGTGCCAGCTGGGCACCAG
CGGTGGCTTCACCCAGAACACTGTGTACTTCGGCGCCCCCGGTGCCTACAACTGG
AAAGGAAACAGCTACATGATTCAGCGCAAGGAGTGGGACTTATCTGAGTATAGTT
ACAAGGACCCAGAGGACCAAGGAAACCTCTATATTGGGTACACGATGCAGGTAG
GCAGCTTCATCCTGCACCCCAAAAACATCACCATTGTGACAGGTGCCCCACGGCA
CCGACATATGGGCGCGGTGTTCTTGCTGAGCCAGGAGGCAGGCGGAGACCTGCGG
AGGAGGCAGGTGCTGGAGGGCTCGCAGGTGGGCGCCTATTTTGGCAGCGCCATTG
CCCTGGCAGACCTGAACAATGATGGGTGGCAGGACCTCCTGGTGGGCGCCCCCTA
CTACTTCGAGAGGAAAGAGGAAGTAGGGGGTGCCATCTATGTCTTCATGAACCAG
GCGGGAACCTCCTTCCCTGCTCACCCCTCACTCCTTCTTCATGGCCCCAGTGGCTC
TGCCTTTGGTTTATCTGTGGCCAGCATTGGTGACATCAACCAGGATGGATTTCAGG
ATATTGCTGTGGGAGCTCCGTTTGAAGGCTTGGGCAAAGTGTACATCTATCACAGT
AGCTCTAAGGGGCTCCTTAGACAGCCCCAGCAGGTAATCCATGGAGAGAAGCTGG
GACTGCCTGGGTTGGCCACCTTCGGCTATTCCCTCAGTGGGCAGATGGATGTGGAT
GAGAACTTCTACCCAGACCTTCTAGTGGGAAGCCTGTCAGACCACATTGTGCTGCT
GCGGGCCCGGCCCGTCATCAACATCGTCCACAAGACCTTGGTGCCCAGGCCAGCT
GTGCTGGACCCTGCACTTTGCACGGCCACCTCTTGTGTGCAAGTGGAGCTGTGCTT
TGCTTACAACCAGAGTGCCGGGAACCCCAACTACAGGCGAAACATCACCCTGGCC
TACACTCTGGAGGCTGACAGGGACCGCCGGCCGCCCCGGCTCCGCTTTGCCGGCA
GTGAGTCCGCTGTCTTCCACGGCTTCTTCTCCATGCCCGAGATGCGCTGCCAGAAG
CTGGAGCTGCTCCTGATGGACAACCTCCGTGACAAACTCCGCCCCATCATCATCTC
CATGAACTACTCTTTACCTTTGCGGATGCCCGATCGCCCCCGGCTGGGGCTGCGGT
CCCTGGACGCCTACCCGATCCTCAACCAGGCACAGGCTCTGGAGAACCACACTGA
GGTCCAGTTCCAGAAGGAGTGCGGGCCTGACAACAAGTGTGAGAGCAACTTGCA
GATGCGGGCAGCCTTCGTGTCAGAGCAGCAGCAGAAGCTGAGCAGGCTCCAGTAC
AGCAGAGACGTCCGGAAATTGCTCCTGAGCATCAACGTGACGAACACCCGGACCT
CGGAGCGCTCCGGGGAGGACGCCCACGAGGCGCTGCTCACCCTGGTGGTGCCTCC
CGCCCTGCTGCTGTCCTCAGTGCGCCCCCCCGGGGCCTGCCAAGCTAATGAGACC
ATCTTTTGCGAGCTGGGGAACCCCTTCAAACGGAACCAGAGGATGGAGCTGCTCA
TCGCCTTTGAGGTCATCGGGGTGACCCTGCACACAAGGGACCTTCAGGTGCAGCT
GCAGCTCTCCACGTCGAGTCACCAGGACAACCTGTGGCCCATGATCCTCACTCTGC
TGGTGGACTATACACTCCAGACCTCGCTTAGCATGGTAAATCACCGGCTACAAAG
CTTCTTTGGGGGGACAGTGATGGGTGAGTCTGGCATGAAAACTGTGGAGGATGTA
GGAAGCCCCCTCAAGTATGAATTCCAGGTGGGCCCAATGGGGGAGGGGCTGGTG
GGCCTGGGGACCCTGGTCCTAGGTCTGGAGTGGCCCTACGAAGTCAGCAATGGCA
AGTGGCTGCTGTATCCCACGGAGATCACCGTCCATGGCAATGGGTCCTGGCCCTG
CCGACCACCTGGAGACCTTATCAACCCTCTCAACCTCACTCTTTCTGACCCTGGGG
ACAGGCCATCATCCCCACAGCGCAGGOGGCGACAGCTGGATCCAGGGGGAGGCC
AGGGCCCCCCACCTGTCACTCTGGCTGCTGCCAAAAAAGCCAAGTCTGAGACTGT
GCTGACCTGTGCCACAGGGCGTGCCCACTGTGTGTGGCTAGAGTGCCCCATCCCT
GATGCCCCCGTTGTCACCAACGTGACTGTGAAGGCACGAGTGTGGAACAGCACCT
TCATCGAGGATTACAGAGACTTTGACCGAGTCCGGGTAAATGGCTGGGCTACCCT
ATTCCTCCGAACCAGCATCCCCACCATCAACATGGAGAACAAGACCACGTGGTTC
TCTGTGGACATTGACTCGGAGCTGGTGGAGGAGCTGCCGGCCGAAATCGAGCTGT
GGCTGGTGCTGGTGGCCGTGGGTGCAGGGCTGCTGCTGCTGGGGCTGATCATCCT
CCTGCTGTGGAAGTGTGACTTCTTTAAGCGGACCCGCTATTATCAGATCATGCCCA
AGTACCACGCAGTGOGGATCCGGGAGGAGGAGCGCTACCCACCTCCAGGGAGCA
CCCTGCCCACCAAGAAGCACTGGGTGACCAGCTGGCAGACTCGGGACCAATACTA
CTGA; Transcript ID ENST00000007722; Homo sapiens
84:
MGPGPSRAPRAPRLMLCALALMVAAGGCVVSAFNLDTRFLVVKEAGNPGSLFGYSV
ALHRQTERQQRYLLLAGAPRELAVPDGYTNRTGAVYLCPLTAHKDDCERMNITVKN
DPGHHIIEDMWLGVTVASQGPAGRVLVCAHRYTQVLWSGSEDQRRMVGKCYVRGN
DLELDSSDDWQTYHNEMCNSNTDYLETGMCQLGTSGGFTQNTVYFGAPGAYNWKG
NSYMIQRKEWDLSEYSYKDPEDQGNLYIGYTMQVGSFILHPKNITIVTGAPRHRHMG
AVFLLSQEAGGDLRRRQVLEGSQVGAYFGSAIALADLNNDGWQDLLVGAPYYFERK
EEVGGAIYVFMNQAGTSFPAHPSLLLHGPSGSAFGLSVASIGDINQDGFQDIAVGAPFE
GLGKVYIYHSSSKGLLRQPQQVIHGEKLGLPGLATFGYSLSGQMDVDENFYPDLLVG
SLSDHIVLLRARPVINIVHKTLVPRPAVLDPALCTATSCVQVELCFAYNQSAGNPNYR
RNITLAYTLEADRDRRPPRLRFAGSESAVFHGFFSMPEMRCQKLELLLMDNLRDKLRP
IIISMNYSLPLRMPDRPRLGLRSLDAYPILNQAQALENHTEVQFQKECGPDNKCESNLQ
MRAAFVSEQQQKLSRLQYSRDVRKLLLSINVINTRTSERSGEDAHEALLTLVVPPALL
LSSVRPPGACQANETIFCELGNPFKRNQRMELLIAFEVIGVTLHTRDLQVQLQLSTSSH
QDNLWPMILTLLVDYTLQTSLSMVNHRLQSFFGGTVMGESGMKTVEDVGSPLKYEF
QVGPMGEGLVGLGTLVLGLEWPYEVSNGKWLLYPTEITVHGNGSWPCRPPGDLINPL
NLTLSDPGDRPSSPQRRRRQLDPGGGQGPPPVTLAAAKKAKSETVLTCATGRAHCVW
LECPIPDAPVVTNVTVKARVWNSTFIEDYRDFDRVRVNGWATLFLRTSIPTINMENKT
TWFSVDIDSELVEELPAEIELWLVLVAVGAGLLLLGLIILLLWKCDFFKRTRYYQIMPK
YHAVRIREEERYPPPGSTLPTKKHWVTSWQTRDQYY; ITGA3 protein
(ENSP00000007722) encoded by Transcript ID ENST00000007722 from Gene ID
ENSG00000005884; Homo sapiens
85:
ATGGGCCCCGGCCCCAGCCGCGCGCCCCGCGCCCCACGCCTGATGCTCTGTGCGC
TCGCCTTGATGGTGGCGGCCGGCGGCTGCGTCGTCTCCGCCTTCAACCTGGATACC
CGATTCCTGGTAGTGAAGGAGGCCGGGAACCCGGGCAGCCTCTTCGGCTACTCGG
TCGCCCTCCATCGGCAGACAGAGCGGCAGCAGCGCTACCTGCTCCTGGCTGGTGC
CCCCCGGGAGCTCGCTGTGCCCGATGGCTACACCAACCGGACTGGTGCTGTGTAC
CTGTGCCCACTCACTGCCCACAAGGATGACTGTGAGCGGATGAACATCACAGTGA
AAAATGACCCTGGCCATCACATTATTGAGGACATGTGGCTTGGAGTGACTGTGGC
CAGCCAGGGCCCTGCAGGCAGAGTTCTGGTCTGTGCCCACCGCTACACCCAGGTG
CTGTGGTCAGGGTCAGAAGACCAGCGGCGCATGGTGGGCAAGTGCTACGTGCGA
GGCAATGACCTAGAGCTGGACTCCAGTGATGACTGGCAGACCTACCACAACGAGA
TGTGCAATAGCAACACAGACTACCTGGAGACGGGCATGTGCCAGCTGGGCACCAG
CGGTGGCTTCACCCAGAACACTGTGTACTTCGGCGCCCCCGGTGCCTACAACTGG
AAAGGAAACAGCTACATGATTCAGCGCAAGGAGTGGGACTTATCTGAGTATAGTT
ACAAGGACCCAGAGGACCAAGGAAACCTCTATATTGGGTACACGATGCAGGTAG
GCAGCTTCATCCTGCACCCCAAAAACATCACCATTGTGACAGGTGCCCCACGGCA
CCGACATATGGGCGCGGTGTTCTTGCTGAGCCAGGAGGCAGGCGGAGACCTGCGG
AGGAGGCAGGTGCTGGAGGGCTCGCAGGTGGGCGCCTATTTTGGCAGOGCCATTG
CCCTGGCAGACCTGAACAATGATGGGTGGCAGGACCTCCTGGTGGGCGCCCCCTA
CTACTTCGAGAGGAAAGAGGAAGTAGGGGGTGCCATCTATGTCTTCATGAACCAG
GCGGGAACCTCCTTCCCTGCTCACCCCTCACTCCTTCTTCATGGCCCCAGTGGCTC
TGCCTTTGGTTTATCTGTGGCCAGCATTGGTGACATCAACCAGGATGGATTTCAGG
ATATTGCTGTGGGAGCTCCGTTTGAAGGCTTGGGCAAAGTGTACATCTATCACAGT
AGCTCTAAGGGGCTCCTTAGACAGCCCCAGCAGGTAATCCATGGAGAGAAGCTGG
GACTGCCTGGGTTGGCCACCTTCGGCTATTCCCTCAGTGGGCAGATGGATGTGGAT
GAGAACTTCTACCCAGACCTTCTAGTGGGAAGCCTGTCAGACCACATTGTGCTGCT
GCGGGCCCGGCCCGTCATCAACATCGTCCACAAGACCTTGGTGCCCAGGCCAGCT
GTGCTGGACCCTGCACTTTGCACGGCCACCTCTTGTGTGCAAGTGGAGCTGTGCTT
TGCTTACAACCAGAGTGCCGGGAACCCCAACTACAGGCGAAACATCACCCTGGCC
TACACTCTGGAGGCTGACAGGGACCGCCGGCCGCCCCGGCTCCGCTTTGCCGGCA
GTGAGTCCGCTGTCTTCCACGGCTTCTTCTCCATGCCCGAGATGCGCTGCCAGAAG
CTGGAGCTGCTCCTGATGGACAACCTCCGTGACAAACTCCGCCCCATCATCATCTC
CATGAACTACTCTTTACCTTTGOGGATGCCCGATCGCCCCCGGCTGGGGCTGCGGT
CCCTGGACGCCTACCCGATCCTCAACCAGGCACAGGCTCTGGAGAACCACACTGA
GGTCCAGTTCCAGAAGGAGTGCGGGCCTGACAACAAGTGTGAGAGCAACTTGCA
GATGCGGGCAGCCTTCGTGTCAGAGCAGCAGCAGAAGCTGAGCAGGCTCCAGTAC
AGCAGAGACGTCCGGAAATTGCTCCTGAGCATCAACGTGACGAACACCCGGACCT
CGGAGCGCTCCGGGGAGGACGCCCACGAGGCGCTGCTCACCCTGGTGGTGCCTCC
CGCCCTGCTGCTGTCCTCAGTGCGCCCCCCCGGGGCCTGCCAAGCTAATGAGACC
ATCTTTTGCGAGCTGGGGAACCCCTTCAAACGGAACCAGAGGATGGAGCTGCTCA
TCGCCTTTGAGGTCATCGGGGTGACCCTGCACACAAGGGACCTTCAGGTGCAGCT
GCAGCTCTCCACGTCGAGTCACCAGGACAACCTGTGGCCCATGATCCTCACTCTGC
TGGTGGACTATACACTCCAGACCTCGCTTAGCATGGTAAATCACCGGCTACAAAG
CTTCTTTGGGGGGACAGTGATGGGTGAGTCTGGCATGAAAACTGTGGAGGATGTA
GGAAGCCCCCTCAAGTATGAATTCCAGGTGGGCCCAATGGGGGAGGGGCTGGTG
GGCCTGGGGACCCTGGTCCTAGGTCTGGAGTGGCCCTACGAAGTCAGCAATGGCA
AGTGGCTGCTGTATCCCACGGAGATCACCGTCCATGGCAATGGGTCCTGGCCCTG
CCGACCACCTGGAGACCTTATCAACCCTCTCAACCTCACTCTTTCTGACCCTGGGG
ACAGGCCATCATCCCCACAGCGCAGGCGGCGACAGCTGGATCCAGGGGGAGGCC
AGGGCCCCCCACCTGTCACTCTGGCTGCTGCCAAAAAAGCCAAGTCTGAGACTGT
GCTGACCTGTGCCACAGGGCGTGCCCACTGTGTGTGGCTAGAGTGCCCCATCCCT
GATGCCCCCGTTGTCACCAACGTGACTGTGAAGGCACGAGTGTGGAACAGCACCT
TCATCGAGGATTACAGAGACTTTGACCGAGTCCGGGTAAATGGCTGGGCTACCCT
ATTCCTCCGAACCAGCATCCCCACCATCAACATGGAGAACAAGACCACGTGGTTC
TCTGTGGACATTGACTCGGAGCTGGTGGAGGAGCTGCCGGCCGAAATCGAGCTGT
GGCTGGTGCTGGTGGCCGTGGGTGCAGGGCTGCTGCTGCTGGGGCTGATCATCCT
CCTGCTGTGGAAGTGCGGCTTCTTCAAGCGAGCCCGCACTCGCGCCCTGTATGAA
GCTAAGAGGCAGAAGGCGGAGATGAAGAGCCAGCCGTCAGAGACAGAGAGGCTG
ACCGACGACTACTGA; Transcript ID ENST00000320031; Homo sapiens
86:
MGPGPSRAPRAPRLMLCALALMVAAGGCVVSAFNLDTRFLVVKEAGNPGSLFGYSV
ALHRQTERQQRYLLLAGAPRELAVPDGYTNRTGAVYLCPLTAHKDDCERMNITVKN
DPGHHIIEDMWLGVTVASQGPAGRVLVCAHRYTQVLWSGSEDQRRMVGKCYVRGN
DLELDSSDDWQTYHNEMCNSNTDYLETGMCQLGTSGGFTQNTVYFGAPGAYNWKG
NSYMIQRKEWDLSEYSYKDPEDQGNLYIGYTMQVGSFILHPKNITIVTGAPRHRHMG
AVFLLSQEAGGDLRRRQVLEGSQVGAYFGSAIALADLNNDGWQDLLVGAPYYFERK
EEVGGAIYVFMNQAGTSFPAHPSLLLHGPSGSAFGLSVASIGDINQDGFQDIAVGAPFE
GLGKVYTYHSSSKGLLRQPQQVIHGEKLGLPGLATFGYSLSGQMDVDENFYPDLLVG
SLSDHIVLLRARPVINIVHKTLVPRPAVLDPALCTATSCVQVELCFAYNQSAGNPNYR
RNITLAYTLEADRDRRPPRLRFAGSESAVFHGFFSMPEMRCQKLELLLMDNLRDKLRP
IIISMNYSLPLRMPDRPRLGLRSLDAYPILNQAQALENHTEVQFQKECGPDNKCESNLQ
MRAAFVSEQQQKLSRLQYSRDVRKLLLSINVINTRTSERSGEDAHEALLTLVVPPALL
LSSVRPPGACQANETIFCELGNPFKRNQRMELLIAFEVIGVTLHTRDLQVQLQLSTSSH
QDNLWPMILTLLVDYTLQTSLSMVNHRLQSFFGGTVMGESGMKTVEDVGSPLKYEF
QVGPMGEGLVGLGTLVLGLEWPYEVSNGKWLLYPTEITVHGNGSWPCRPPGDLINPL
NLTLSDPGDRPSSPQRRRRQLDPGGGQGPPPVTLAAAKKAKSETVLTCATGRAHCVW
LECPIPDAPVVTNVTVKARVWNSTFIEDYRDFDRVRVNGWATLFLRTSIPTINMENKT
TWFSVDIDSELVEELPAEIELWLVLVAVGAGLLLLGLIILLLWKCGFFKRARTRALYE
AKRQKAEMKSQPSETERLTDDY; ITGA3 protein (ENSP00000315190) encoded by
Transcript ID ENST00000320031 from Gene ID ENSG00000005884; Homo sapiens
87:
ATGAATTTACAACCAATTTTCTGGATTGGACTGATCAGTTCAGTTTGCTGTGTGTT
TGCTCAAACAGATGAAAATAGATGTTTAAAAGCAAATGCCAAATCATGTGGAGAA
TGTATACAAGCAGGGCCAAATTGTGGGTGGTGCACAAATTCAACATTTTTACAGG
AAGGAATGCCTACTTCTGCACGATGTGATGATTTAGAAGCCTTAAAAAAGAAGGG
TTGCCCTCCAGATGACATAGAAAATCCCAGAGGCTCCAAAGATATAAAGAAAAAT
AAAAATGTAACCAACCGTAGCAAAGGAACAGCAGAGAAGCTCAAGCCAGAGGAT
ATTACTCAGATCCAACCACAGCAGTTGGTTTTGCGATTAAGATCAGGGGAGCCAC
AGACATTTACATTAAAATTCAAGAGAGCTGAAGACTATOCCATTGACCTCTACTA
CCTTATGGACCTGTCTTACTCAATGAAAGACGATTTGGAGAATGTAAAAAGTCTT
GGAACAGATCTGATGAATGAAATGAGGAGGATTACTTCGGACTTCAGAATTGGAT
TTGGCTCATTTGTGGAAAAGACTGTGATGCCTTACATTAGCACAACACCAGCTAA
GCTCAGGAACCCTTGCACAAGTGAACAGAACTGCACCAGCCCATTTAGCTACAAA
AATGTGCTCAGTCTTACTAATAAAGGAGAAGTATTTAATGAACTTGTTGGAAAAC
AGCGCATATCTGGAAATTTGGATTCTCCAGAAGGTGGTTTCGATGCCATCATGCA
AGTTGCAGTTTGTGGATCACTGATTGGCTGGAGGAATGTTACACGGCTGCTGGTGT
TTTCCACAGATGCCGGGTTTCACTTTGCTGGAGATGGGAAACTTGGTGGCATTGTT
TTACCAAATGATGGACAATGTCACCTGGAAAATAATATGTACACAATGAGCCATT
ATTATGATTATCCTTCTATTGCTCACCTTGTCCAGAAACTGAGTGAAAATAATATT
CAGACAATTTTTGCAGTTACTGAAGAATTTCAGCCTGTTTACAAGGAGCTGAAAA
ACTTGATCCCTAAGTCAGCAGTAGGAACATTATCTGCAAATTCTAGCAATGTAATT
CAGTTGATCATTGATGCATACAATTCCCTTTCCTCAGAAGTCATTTTGGAAAACGG
CAAATTGTCAGAAGGCGTAACAATAAGTTACAAATCTTACTGCAAGAACGGGGTG
AATGGAACAGGGGAAAATGGAAGAAAATGTTCCAATATTTCCATTGGAGATGAG
GTTCAATTTGAAATTAGCATAACTTCAAATAAGTGTCCAAAAAAGGATTCTGACA
GCTTTAAAATTAGGCCTCTGGGCTTTACGGAGGAAGTAGAGGTTATTCTTCAGTAC
ATCTGTGAATGTGAATGCCAAAGCGAAGGCATCCCTGAAAGTCCCAAGTGTCATG
AAGGAAATGGGACATTTGAGTGTGGCGCGTGCAGGTGCAATGAAGGGCGTGTTG
GTAGACATTGTGAATGCAGCACAGATGAAGTTAACAGTGAAGACATGGATGCTTA
CTGCAGGAAAGAAAACAGTTCAGAAATCTGCAGTAACAATGGAGAGTGCGTCTG
CGGACAGTGTGTTTGTAGGAAGAGGGATAATACAAATGAAATTTATTCTGGCAAA
TTCTGCGAGTGTGATAATTTCAACTGTGATAGATCCAATGGCTTAATTTGTGGAGG
AAATGGTGTTTGCAAGTGTCGTGTGTGTGAGTGCAACCCCAACTACACTGGCAGT
GCATGTGACTGTTCTTTGGATACTAGTACTTGTGAAGCCAGCAACGGACAGATCT
GCAATGGCCGGGGCATCTGCGAGTGTGGTGTCTGTAAGTGTACAGATCCGAAGTT
TCAAGGGCAAACGTGTGAGATGTGTCAGACCTGCCTTGGTGTCTGTGCTGAGCAT
AAAGAATGTGTTCAGTGCAGAGCCTTCAATAAAGGAGAAAAGAAAGACACATGC
ACACAGGAATGTTCCTATTTTAACATTACCAAGGTAGAAAGTCGGGACAAATTAC
CCCAGCCGGTCCAACCTGATCCTGTGTCCCATTGTAAGGAGAAGGATGTTGACGA
CTGTTGGTTCTATTTTACGTATTCAGTGAATGGGAACAACGAGGTCATGGTTCATG
TTGTGGAGAATCCAGAGTGTCCCACTGGTCCAGACATCATTCCAATTGTAGCTGGT
GTGGTTGCTGGAATTGTTCTTATTGGCCTTGCATTACTGCTGATATGGAAGCTTTT
AATGATAATTCATGACAGAAGGGAGTTTGCTAAATTTGAAAAGGAGAAAATGAAT
GCCAAATGGGACACGGGTGAAAATCCTATTTATAAGAGTGCCGTAACAACTGTGG
TCAATCCGAAGTATGAGGGAAAATGA; Transcript ID ENST00000302278; Homo
sapiens, Transcript ID ENST00000396033; Homo sapiens
88:
MNLQPIFWIGLISSVCCVFAQTDENRCLKANAKSCGECIQAGPNCGWCINSTFLQEG
MPTSARCDDLEALKKKGCPPDDIENPRGSKDIKKNKNVTNRSKGTAEKLKPEDITQIQ
PQQLVLRLRSGEPQTFTLKFKRAEDYPIDLYYLMDLSYSMKDDLENVKSLGTDLMNE
MRRITSDFRIGFGSFVEKTVMPYISTTPAKLRNPCTSEQNCTSPFSYKNVLSLINKGEV
FNELVGKORISGNLDSPEGGFDAIMQVAVCGSLIGWRNVTRLLVFSTDAGFHFAGDG
KLGGIVLPNDGOCHLENNMYTMSHYYDYPSIAHLVQKLSENNIQTIFAVTEEFQPVYK
ELKNLIPKSAVGTLSANSSNVIQLIIDAYNSLSSEVILENGKLSEGVTISYKSYCKNGVN
GTGENGRKCSNISIGDEVOFEISITSNKCPKKDSDSFKIRPLGFTEEVEVILQYICECECQ
SEGIPESPKCHEGNGTFECGACRCNEGRVGRHCECSTDEVNSEDMDAYCRKENSSEIC
SNNGECVCGQCVCRKRDNTNEIYSGKFCECDNFNCDRSNGLICGGNGVCKCRVCECN
PNYTGSACDCSLDTSTCEASNGQICNGRGICECGVCKCTDPKFQGQTCEMCQTCLGV
CAEHKECVQCRAFNKGEKKDTCTQECSYFNITKVESRDKLPQPVQPDPVSHCKEKDV
DDCWFYFTYSVNGNNEVMVHVVENPECPTGPDIIPIVAGVVAGIVLIGLALLLIWKLL
MIIHDRREFAKFEKEKMNAKWDTGENPIYKSAVTTVVNPKYEGK; ITGB1 protein
(ENSP00000303351) encoded by Transcript ID ENST00000302278 from Gene ID
ENSG00000150093; Homo sapiens, ITGBI protein (ENSP00000379350) encoded by
Transcript ID ENST00000396033 from Gene ID ENSG00000150093; Homo sapiens
89:
ATGAATTTACAACCAATTTTCTGGATTGGACTGATCAGTTCAGTTTGCTGTGTGTT
TGCTCAAACAGATGAAAATAGATGTTTAAAAGCAAATGCCAAATCATGTGGAGAA
TGTATACAAGCAGGGCCAAATTGTGGGTGGTGCACAAATTCAACATTTTTACAGG
AAGGAATGCCTACTTCTGCACGATGTGATGATTTAGAAGCCTTAAAAAAGAAGGG
TTGCCCTCCAGATGACATAGAAAATCCCAGAGGCTCCAAAGATATAAAGAAAAAT
AAAAATGTAACCAACCGTAGCAAAGGAACAGCAGAGAAGCTCAAGCCAGAGGAT
ATTACTCAGATCCAACCACAGCAGTTGGTTTTGCGATTAAGATCAGGGGAGCCAC
AGACATTTACATTAAAATTCAAGAGAGCTGAAGACTATCCCATTGACCTCTACTA
CCTTATGGACCTGTCTTACTCAATGAAAGACGATTTGGAGAATGTAAAAAGTCTT
GGAACAGATCTGATGAATGAAATGAGGAGGATTACTTCGGACTTCAGAATTGGAT
TTGGCTCATTTGTGGAAAAGACTGTGATGCCTTACATTAGCACAACACCAGCTAA
GCTCAGGAACCCTTGCACAAGTGAACAGAACTGCACCAGCCCATTTAGCTACAAA
AATGTGCTCAGTCTTACTAATAAAGGAGAAGTATTTAATGAACTTGTTGGAAAAC
AGCGCATATCTGGAAATTTGGATTCTCCAGAAGGTGGTTTCGATGCCATCATGCA
AGTTGCAGTTTGTGGATCACTGATTGGCTGGAGGAATGTTACACGGCTGCTGGTGT
TTTCCACAGATGCCGGGTTTCACTTTGCTGGAGATGGGAAACTTGGTGGCATTGTT
TTACCAAATGATGGACAATGTCACCTGGAAAATAATATGTACACAATGAGCCATT
ATTATGATTATCCTTCTATTGCTCACCTTGTCCAGAAACTGAGTGAAAATAATATT
CAGACAATTTTTGCAGTTACTGAAGAATTTCAGCCTGTTTACAAGGAGCTGAAAA
ACTTGATCCCTAAGTCAGCAGTAGGAACATTATCTGCAAATTCTAGCAATGTAATT
CAGTTGATCATTGATGCATACAATTCCCTTTCCTCAGAAGTCATTTTGGAAAACGG
CAAATTGTCAGAAGGCGTAACAATAAGTTACAAATCTTACTGCAAGAACGGGGTG
AATGGAACAGGGGAAAATGGAAGAAAATGTTCCAATATTTCCATTGGAGATGAG
GTTCAATTTGAAATTACCATAACTTCAAATAAGTGTCCAAAAAAGGATTCTGACA
GCTTTAAAATTAGGCCTCTGGGCTTTACGGAGGAAGTAGAGGTTATTCTTCAGTAC
ATGTGTGAATGTGAATGCCAAAGCGAAGGCATCCCTGAAAGTCCCAAGTGTCATG
AAGGAAATGGGACATTTGAGTGTGGCGCGTGCAGGTGCAATGAAGGGCGTGTTG
GTAGACATTGTGAATGCAGCACAGATGAAGTTAACAGTGAAGACATGGATGCTTA
CTGCAGGAAAGAAAACAGTTCAGAAATCTGCAGTAACAATGGAGAGTGCGTCTG
CGGACAGTGTGTTTGTAGGAAGAGGGATAATACAAATGAAATTTATTCTGGCAAA
TTCTGCGAGTGTGATAATTTCAACTGTGATAGATCCAATGGCTTAATTTGTGGAGG
AAATGGTGTTTGCAAGTGTCGTGTGTGTGAGTGCAACCCCAACTACACTGGCAGT
GCATGTGACTGTTCTTTGGATACTAGTACTTGTGAAGCCAGCAACGGACAGATCT
GCAATGGCCGGGGCATCTGCGAGTGTGGTGTCTGTAAGTGTACAGATCCGAAGTT
TCAAGGGCAAACGTGTGAGATGTGTCAGACCTGCCTTGGTGTCTGTGCTGAGCAT
AAAGAATGTGTTCAGTGCAGAGCCTTCAATAAAGGAGAAAAGAAAGACACATGC
ACACAGGAATGTTCCTATTTTAACATTACCAAGGTAGAAAGTCGGGACAAATTAC
CCCAGCCGGTCCAACCTGATCCTGTGTCCCATTGTAAGGAGAAGGATGTTGACGA
CTGTTGGTTCTATTTTACGTATTCAGTGAATGGGAACAACGAGGTCATGGTTCATG
TTGTGGAGAATCCAGAGTGTCCCACTGGTCCAGACATCATTCCAATTGTAGCTGGT
GTGGTTGCTGGAATTGTTCTTATTGGCCTTGCATTACTGCTGATATGGAAGCTTTT
AATGATAATTCATGACAGAAGGGAGTTTGCTAAATTTGAAAAGGAGAAAATGAAT
GCCAAATGGGACACGCAAGAAAATCCGATTTACAAGAGTCCTATTAATAATTTCA
AGAATCCAAACTACGGACGTAAAGCTGGTCTCTAA; Transcript ID
ENST00000423113; Homo sapiens
90:
MNLQPIFWIGLISSVCCVFAQTDENRCLKANAKSCGECIQAGPNCGWCTNSTFLQEG
MPTSARCDDLEALKKKGCPPDDIENPRGSKDIKKNKNVTNRSKGTAEKLKPEDITQIQ
PQQLVLRLRSGEPQTFTLKFKRAEDYPIDLYYLMDLSYSMKDDLENVKSLGTDLMNE
MRRITSDFRIGFGSFVEKTVMPYISTTPAKLRNPCTSEQNCTSPFSYKNVLSLINKGEV
FNELVGKQRISGNLDSPEGGFDAIMQVAVCGSLIGWRNVTRLLVFSTDAGFHFAGDG
KLGGIVLPNDGQCHLENNMYTMSHYYDYPSIAHLVQKLSENNIQTIFAVTEEFQPVYK
ELKNLIPKSAVGTLSANSSNVIQLIIDAYNSLSSEVILENGKLSEGVTISYKSYCKNGVN
GTGENGRKCSNISIGDEVQFEISITSNKCPKKDSDSFKIRPLGFTEEVEVILQYICECECQ
SEGIPESPKCHEGNGTFECGACRCNEGRVGRHCECSTDEVNSEDMDAYCRKENSSEIC
SNNGECVCGQCVCRKRDNTNEIYSGKFCECDNFNCDRSNGLICGGNGVCKCRVCECN
PNYTGSACDCSLDTSTCEASNGQICNGRGICECGVCKCTDPKFQGQTCEMCQTCLGV
CAEHKECVQCRAFNKGEKKDTCTQECSYFNITKVESRDKLPQPVQPDPVSHCKEKDV
DDCWFYFTYSVNGNNEVMVHVVENPECPTGPDIIPIVAGVVAGIVLIGLALLLIWKLL
[sequence omitted]; ITGB1 protein
(ENSP00000388694) encoded by Transcript ID ENST00000423113 from Gene ID
ENSG00000150093; Homo sapiens
91:
ATGGTGTGCTTCCGCCTCTTCCCGGTTCCGGGCTCAGGGCTCGTTCTGGTCTGCCT
AGTCCTGGGAGCTGTGCGGTCTTATGCATTGGAACTTAATTTGACAGATTCAGAA
AATGCCACTTGCCTTTATGCAAAATGGCAGATGAATTTCACAGTACGCTATGAAA
CTACAAATAAAACTTATAAAACTGTAACCATTTCAGACCATGGCACTGTGACATA
TAATGGAAGCATTTGTGGGGATGATCAGAATGGTCCCAAAATAGCAGTGCAGTTC
GGACCTGGCTTTTCCTGGATTGCGAATTTTACCAAGGCAGCATCTACTTATTCAAT
TGACAGCGTCTCATTTTCCTACAACACTGGTGATAACACAACATTTCCTGATGCTG
AAGATAAAGGAATTCTTACTGTTGATGAACTTTTGGCCATCAGAATTCCATTGAAT
GACCTTTTTAGATGCAATAGTTTATCAACTTTGGAAAAGAATGATGTTGTCCAACA
CTACTGGGATGTTCTTGTACAAGCTTTTGTCCAAAATGGCACAGTGAGCACAAAT
GAGTTCCTGTGTGATAAAGACAAAACTTCAACAGTGGCACCCACCATACACACCA
CTGTGCCATCTCCTACTACAACACCTACTCCAAAGGAAAAACCAGAAGCTGGAAC
CTATTCAGTTAATAATGGCAATGATACTTGTCTGCTGGCTACCATGGGGCTGCAGC
TGAACATCACTCAGGATAAGGTTGCTTCAGTTATTAACATCAACCCCAATACAACT
CACTCCACAGGCAGCTGCCGTTCTCACACTGCTCTACTTAGACTCAATAGCAGCAC
CATTAAGTATCTAGACTTTGTCTTTGCTGTGAAAAATGAAAACCGATTTTATCTGA
AGGAAGTGAACATCAGCATGTATTTGGTTAATGGCTCCGTTTTCAGCATTGCAAAT
AACAATCTCAGCTACTGGGATGCCCCCCTGGGAAGTTCTTATATGTGCAACAAAG
AGCAGACTGTTTCAGTGTCTGGAGCATTTCAGATAAATACCTTTGATCTAAGGGTT
CAGCCTTTCAATGTGACACAAGGAAAGTATTCTACAGCTCAAGACTGCAGTGCAG
ATGACGACAACTTCCTTGTGCCCATAGCGGTGGGAGCTGCCTTGGCAGGAGTACT
TATTCTAGTGTTGCTGGCTTATTTTATTGGTCTCAAGCACCATCATGCTGGATATG
AGCAATTTTAG; Transcript ID ENST00000200639; Homo sapiens
92:
MVCFRLFPVPGSGLVLVCLVLGAVRSYALELNLTDSENATCLYAKWQMNFTVRYET
TNKTYKTVTISDHGTVTYNGSICGDDQNGPKIAVQFGPGFSWIANFTKAASTYSIDSVS
FSYNTGDNTTFPDAEDKGILTVDELLAIRIPLNDLFRCNSLSTLEKNDVVQHYWDVLV
QAFVQNGTVSTNEFLCDKDKTSTVAPTIHTTVPSPTTTPTPKEKPEAGTYSVNNGNDT
CLLATMGLQLNITQDKVASVININPNTTHSTGSCRSHTALLRLNSSTIKYLDFVFAVKN
ENRFYLKEVNISMYLVNGSVFSIANNNLSYWDAPLGSSYMCNKEQTVSVSGAFQINTF
DLRVQPFNVTQGKYSTAQDCSADDDNFLVPIAVGAALAGVLILVLLAYFIGLKHHHA
GYEQF; LAMP2 protein (ENSP00000200639) encoded by Transcript ID
ENST00000200639 from Gene ID ENSG00000005893; Homo sapiens
93:
ATGGTGTGCTTCCGCCTCTTCCCGGTTCCGGGCTCAGGGCTCGTTCTGGTCTGCCT
AGTCCTGGGAGCTGTGCGGTCTTATGCATTGGAACTTAATTTGACAGATTCAGAA
AATGCCACTTGCCTTTATGCAAAATGGCAGATGAATTTCACAGTACGCTATGAAA
CTACAAATAAAACTTATAAAACTGTAACCATTTCAGACCATGGCACTGTGACATA
TAATGGAAGCATTTGTGGGGATGATCAGAATGGTCCCAAAATAGCAGTGCAGTTC
GGACCTGGCTTTTCCTGGATTGCGAATTTTACCAAGGCAGCATCTACTTATTCAAT
TGACAGCGTCTCATTTTCCTACAACACTGGTGATAACACAACATTTCCTGATGCTG
AAGATAAAGGAATTCTTACTGTTGATGAACTTTTGGCCATCAGAATTCCATTGAAT
GACCTTTTTAGATGCAATAGTTTATCAACTTTGGAAAAGAATGATGTTGTCCAACA
CTACTGGGATGTTCTTGTACAAGCTTTTGTCCAAAATGGCACAGTGAGCACAAAT
GAGTTCCTGTGTGATAAAGACAAAACTTCAACAGTGGCACCCACCATACACACCA
CTGTGCCATCTCCTACTACAACACCTACTCCAAAGGAAAAACCAGAAGCTGGAAC
CTATTCAGTTAATAATGGCAATGATACTTGTCTGCTGGCTACCATGGGGCTGCAGC
TGAACATCACTCAGGATAAGGTTGCTTCAGTTATTAACATCAACCCCAATACAACT
CACTCCACAGGCAGCTGCCGTTCTCACACTGCTCTACTTAGACTCAATAGCAGCAC
CATTAAGTATCTAGACTTTGTCTTTGCTGTGAAAAATGAAAACCGATTTTATCTGA
AGGAAGTGAACATCAGCATGTATTTGGTTAATGGCTCCGTTTTCAGCATTGCAAAT
AACAATCTCAGCTACTGGGATGCCCCCCTGGGAAGTTCTTATATGTGCAACAAAG
AGCAGACTGTTTCAGTGTCTGGAGCATTTCAGATAAATACCTTTGATCTAAGGGTT
CAGCCTTTCAATGTGACACAAGGAAAGTATTCTACAGCCCAAGAGTGTTCGCTGG
ATGATGACACCATTCTAATCCCAATTATAGTTGGTGCTGGTCTTTCAGGCTTGATT
ATCGTTATAGTGATTGCTTACGTAATTGGCAGAAGAAAAAGTTATGCTGGATATC
AGACTCTGTAA; Transcript ID ENST00000371335; Homo sapiens
94:
MVCFRLFPVPGSGLVLVCLVLGAVRSYALELNLTDSENATCLYAKWQMNFTVRYET
TNKTYKTVTISDHGTVTYNGSICGDDQNGPKIAVQFGPGFSWIANFTKAASTYSIDSVS
FSYNTGDNTTFPDAEDKGILTVDELLAIRIPLNDLFRCNSLSTLEKNDVVQHYWDVLV
QAFVQNGTVSTNEFLCDKDKTSTVAPTIHTTVPSPTTTPTPKEKPEAGTYSVNNGNDT
CLLATMGLQLNITQDKVASVININPNTTHSTGSCRSHTALLRLNSSTIKYLDFVFAVKN
ENRFYLKEVNISMYLVNGSVFSIANNNLSYWDAPLGSSYMCNKEQTVSVSGAFQINTF
DLRVQPFNVTQGKYSTAQECSLDDDTILIPIIVGAGLSGLIIVIVIAYVIGRRKSYAGYQ
TL; LAMP2 protein (ENSP00000360386) encoded by Transcript ID
ENST00000371335 from Gene ID ENSG00000005893; Homo sapiens
95:
ATGGTGTGCTTCCGCCTCTTCCCGGTTCCGGGCTCAGGGCTCGTTCTGGTCTGCCT
AGTCCTGGGAGCTGTGCGGTCTTATGCATTGGAACTTAATTTGACAGATTCAGAA
AATGCCACTTGCCTTTATGCAAAATGGCAGATGAATTTCACAGTACGCTATGAAA
CTACAAATAAAACTTATAAAACTGTAACCATTTCAGACCATGGCACTGTGACATA
TAATGGAAGCATTTGTGGGGATGATCAGAATGGTCCCAAAATAGCAGTGCAGTTC
GGACCTGGCTTTTCCTGGATTGCGAATTTTACCAAGGCAGCATCTACTTATTCAAT
TGACAGCGTCTCATTTTCCTACAACACTGGTGATAACACAACATTTCCTGATGCTG
AAGATAAAGGAATTCTTACTGTTGATGAACTTTTGGCCATCAGAATTCCATTGAAT
GACCTTTTTAGATGCAATAGTTTATCAACTTTGGAAAAGAATGATGTTGTCCAACA
CTACTGGGATGTTCTTGTACAAGCTTTTGTCCAAAATGGCACAGTGAGCACAAAT
GAGTTCCTGTGTGATAAAGACAAAACTTCAACAGTGGCACCCACCATACACACCA
CTGTGCCATCTCCTACTACAACACCTACTCCAAAGGAAAAACCAGAAGCTGGAAC
CTATTCAGTTAATAATGGCAATGATACTTGTCTGCTGGCTACCATGGGGCTGCAGC
TGAACATCACTCAGGATAAGGTTGCTTCAGTTATTAACATCAACCCCAATACAACT
CACTCCACAGGCAGCTGCCGTTCTCACACTGCTCTACTTAGACTCAATAGCAGCAC
CATTAAGTATCTAGACTTTGTCTTTGCTGTGAAAAATGAAAACCGATTTTATCTGA
AGGAAGTGAACATCAGCATGTATTTGGTTAATGGCTCCGTTTTCAGCATTGCAAAT
AACAATCTCAGCTACTGGGATGCCCCCCTGGGAAGTTCTTATATGTGCAACAAAG
AGCAGACTGTTTCAGTGTCTGGAGCATTTCAGATAAATACCTTTGATCTAAGGGTT
CAGCCTTTCAATGTGACACAAGGAAAGTATTCTACAGCTGAAGAATGTTCTGCTG
ACTCTGACCTCAACTTTCTTATTCCTGTTGCAGTGGGTGTGGCCTTGGGCTTCCTTA
TAATTGTTGTCTTTATCTCTTATATGATTGGAAGAAGGAAAAGTCGTACTGGTTAT
CAGTCTGTGTAA; Transcript ID ENST00000434600; Homo sapiens
96:
MVCFRLFPVPGSGLVLVCLVLGAVRSYALELNLTDSENATCLYAKWQMNFTVRYET
TNKTYKTVTISDHGTVTYNGSICGDDQNGPKIAVOFGPGFSWIANFTKAASTYSIDSVS
FSYNTGDNTTFPDAEDKGILTVDELLAIRIPLNDLFRCNSLSTLEKNDVVQHYWDVLV
QAFVQNGTVSTNEFLCDKDKTSTVAPTIHTTVPSPTTTPTPKEKPEAGTYSVNNGNDT
CLLATMGLQLNITQDKVASVININPNTTHSTGSCRSHTALLRLNSSTIKYLDFVFAVKN
ENRFYLKEVNISMYLVNGSVFSIANNNLSYWDAPLGSSYMCNKEQTVSVSGAFQINTF
DLRVQPFNVTQGKYSTAEECSADSDLNFLIPVAVGVALGFLIIVVFISYMIGRRKSRTG
YQSV; LAMP2 protein (ENSP00000408411) encoded by Transcript ID
ENST00000434600 from Gene ID ENSG00000005893; Homo sapiens
97:
ATGATCCCCACCTTCACGGCTCTGCTCTGCCTCGGGCTGAGTCTGGGCCCCAGGAC
CCACATGCAGGCAGGGCCCCTCCCCAAACCCACCCTCTGGGCTGAGCCAGGCTCT
GTGATCAGCTGGGGGAACTCTGTGACCATCTGGTGTCAGGGGACCCTGGAGGCTC
GGGAGTACCGTCTGGATAAAGAGGAAAGCCCAGCACCCTGGGACAGACAGAACC
CACTGGAGCCCAAGAACAAGGCCAGATTCTCCATCCCATCCATGACAGAGGACTA
TGCAGGGAGATACCGCTGTTACTATCGCAGCCCTGTAGGCTGGTCACAGCCCAGT
GACCCCCTGGAGCTGGTGATGACAGGAGCCTACAGTAAACCCACCCTTTCAGCCC
TGCCGAGTCCTCTTGTGACCTCAGGAAAGAGCGTGACCCTGCTGTGTCAGTCACG
GAGCCCAATGGACACTTTTCTTCTGATCAAGGAGCGGGCAGCCCATCCCCTACTG
CATCTGAGATCAGAGCACGGAGCTCAGCAGCACCAGGCTGAATTCCCCATGAGTC
CTGTGACCTCAGTGCACGGGGGGACCTACAGGTGCTTCAGCTCACACGGCTTCTC
CCACTACCTGCTGTCACACCCCAGTGACCCCCTGGAGCTCATAGTCTCAGGATCCT
TGGAGGGTCCCAGGCCCTCACCCACAAGGTCCGTCTCAACAGCTGCAGGCCCTGA
GGACCAGCCCCTCATGCCTACAGGGTCAGTCCCCCACAGTGGTCTGAGAAGGCAC
TGGGAGGTACTGATCGGGGTCTTGGTGGTCTCCATCCTGCTTCTCTCCCTCCTCCTC
TTCCTCCTCCTCCAACACTGGCGTCAGGGAAAACACAGGACATTGGCCCAGAGAC
AGGCTGATTTCCAACGTCCTCCAGGGGCTGCCGAGCCAGAGCCCAAGGACGGGGG
CCTACAGAGGAGGTCCAGCCCAGCTGCTGACGTCCAGGGAGAAAACTTCTGTGCT
GCCGTGAAGAACACACAGCCTGAGGACGGGGTGGAAATGGACACTCGGCAGAGC
CCACACGATGAAGACCCCCAGGCAGTGACGTATGCCAAGGTGAAACACTCCAGA
CCTAGGAGAGAAATGGCCTCTCCTCCCTCCCCACTGTCTGGGGAATTCCTGGACAC
AAAGGACAGACAGGCAGAAGAGGACAGACAGATGGACACTGAGGCTGCTGCATC
TGAAGCCCCCCAGGATGTGACCTACGCCCGGCTGCACAGCTTTACCCTCAGACAG
AAGGCAACTGAGCCTCCTCCATCCCAGGAAGGGGCCTCTCCAGCTGAGCCCAGTG
TCTATGCCACTCTGGCCATCCACTAA; Transcript ID ENST00000391736; Homo sapiens
98:
MIPTFTALLCLGLSLGPRTHMQAGPLPKPTLWAEPGSVISWGNSVTIWCQGTLEAREY
RLDKEESPAPWDRQNPLEPKNKARFSIPSMTEDYAGRYRCYYRSPVGWSQPSDPLEL
VMTGAYSKPTLSALPSPLVTSGKSVTLLCQSRSPMDTFLLIKERAAHPLLHLRSEHGA
QQHQAEFPMSPVTSVHGGTYRCFSSHGFSHYLLSHPSDPLELIVSGSLEGPRPSPTRSVS
TAAGPEDQPLMPTGSVPHSGLRRHWEVLIGVLVVSILLLSLLLFLLLQHWRQGKHRTL
AQROADFORPPGAAEPEPKDGGLQRRSSPAADVQGENFCAAVKNTQPEDGVEMDTR
QSPHDEDPQAVTYAKVKHSRPRREMASPPSPLSGEFLDTKDRQAEEDROMDTEAAAS
EAPQDVTYARLHSFTLRQKATEPPPSQEGASPAEPSVYATLAIH; LILRB4 protein
(ENSP00000375616) encoded by Transcript ID ENST00000391736 from Gene ID
ENSG00000186818; Homo sapiens
99:
ATGATCCCCACCTTCACGGCTCTGCTCTGCCTCGGGCTGAGTCTGGGCCCCAGGAC
CCACATGCAGGCAGGGCCCCTCCCCAAACCCACCCTCTGGGCTGAGCCAGGCTCT
GTGATCAGCTGGGGGAACTCTGTGACCATCTGGTGTCAGGGGACCCTGGAGGCTC
GGGAGTACCGTCTGGATAAAGAGGAAAGCCCAGCACCCTGGGACAGACAGAACC
CACTGGAGCCCAAGAACAAGGCCAGATTCTCCATCCCATCCATGACAGAGGACTA
TGCAGGGAGATACCGCTGTTACTATCGCAGCCCTGTAGGCTGGTCACAGCCCAGT
GACCCCCTGGAGCTGGTGATGACAGGAGCCTACAGTAAACCCACCCTTTCAGCCC
TGCCGAGTCCTCTTGTGACCTCAGGAAAGAGCGTGACCCTGCTGTGTCAGTCACG
GAGCCCAATGGACACTTTCCTTCTGATCAAGGAGCGGGCAGCCCATCCCCTACTG
CATCTGAGATCAGAGCACGGAGCTCAGCAGCACCAGGCTGAATTCCCCATGAGTC
CTGTGACCTCAGTGCACGGGGGGACCTACAGGTGCTTCAGCTCACACGGCTTCTC
CCACTACCTGCTGTCACACCCCAGTGACCCCCTGGAGCTCATAGTCTCAGGATCCT
TGGAGGATCCCAGGCCCTCACCCACAAGGTCCGTCTCAACAGCTGCAGGCCCTGA
GGACCAGCCCCTCATGCCTACAGGGTCAGTCCCCCACAGTGGTCTGAGAAGGCAC
TGGGAGGTACTGATCGGGGTCTTGGTGGTCTCCATCCTGCTTCTCTCCCTCCTCCTC
TTCCTCCTCCTCCAACACTGGCGTCAGGGAAAACACAGGACATTGGCCCAGAGAC
AGGCTGATTTCCAACGTCCTCCAGGGGCTGCCGAGCCAGAGCCCAAGGACGGGGG
CCTACAGAGGAGGTCCAGCCCAGCTGCTGACGTCCAGGGAGAAAACTTCTGTGCT
GCCGTGAAGAACACACAGCCTGAGGACGGGGTGGAAATGGACACTCGGCAGAGC
CCACACGATGAAGACCCCCAGGCAGTGACGTATGCCAAGGTGAAACACTCCAGA
CCTAGGAGAGAAATGGCCTCTCCTCCCTCCCCACTGTCTGGGGAATTCCTGGACAC
AAAGGACAGACAGGCAGAAGAGGACAGACAGATGGACACTGAGGCTGCTGCATC
TGAAGCCCCCCAGGATGTGACCTACGCCCAGCTGCACAGCTTTACCCTCAGACAG
AAGGCAACTGAGCCTCCTCCATCCCAGGAAGGGGCCTCTCCAGCTGAGOCCAGTG
TCTATGCCACTCTGGCCATCCACTAA; Transcript ID ENST00000612454; Homo sapiens
100:
MIPTFTALLCLGLSLGPRTHMQAGPLPKPTLWAEPGSVISWGNSVTIWCQGTLEAREY
RLDKEESPAPWDRQNPLEPKNKARFSIPSMTEDYAGRYRCYYRSPVGWSQPSDPLEL
VMTGAYSKPTLSALPSPLVTSGKSVTLLCQSRSPMDTFLLIKERAAHPLLHLRSEHGA
QQHQAEFPMSPVTSVHGGTYRCFSSHGFSHYLLSHPSDPLELIVSGSLEDPRPSPTRSVS
TAAGPEDQPLMPTGSVPHSGLRRHWEVLIGVLVVSILLLSLLLFLLLQHWRQGKHRTL
AQRQADFORPPGAAEPEPKDGGLQRRSSPAADVQGENFCAAVKNTQPEDGVEMDTR
QSPHDEDPQAVTYAKVKHSRPRREMASPPSPLSGEFLDTKDRQABEDRQMDTEAAAS
EAPQDVTYAQLHSFTLRQKATEPPPSQEGASPAEPSVYATLAIH; LILRB4 protein
(ENSP00000479829) encoded by Transcript ID ENST00000612454 from Gene ID
ENSG00000275730; Homo sapiens
101:
ATGATCCCCACCTTCACGGCTCTGCTCTGCCTCGGGCTGAGTCTGGGCCCCAGGAC
CCACATGCAGGCAGGGCCCCTCCCCAAACCCACCCTCTGGGCTGAGCCAGGCTCT
GTGATCAGCTGGGGGAACTCTGTGACCATCTGGTGTCAGGGGACCCTGGAGGCTC
GGGAGTACCGTCTGGATAAAGAGGAAAGCCCAGCACCCTGGGACAGACAGAACC
CACTGGAGCCCAAGAACAAGGCCAGATTCTCCATCCCATCCATGACAGAGGACTA
TGCAGGGAGATACCGCTGTTACTATCGCAGCCCTGTAGGCTGGTCACAGCCCAGT
GACCCCCTGGAGCTGGTGATGACAGGAGCCTACAGTAAACCCACCCTTTCAGCCC
TGCCGAGTCCTCTTGTGACCTCAGGAAAGAGCGTGACCCTGCTGTGTCAGTCACG
GAGCCCAATGGACACTTTCCTTCTGATCAAGGAGCGGGCAGCCCATCCCCTACTG
CATCTGAGATCAGAGCACGGAGCTCAGCAGCACCAGGCTGAATTCCCCATGAGTC
CTGTGACCTCAGTGCACGGGGGGACCTACAGGTGCTTCAGCTCACACGGCTTCTC
CCACTACCTGCTGTCACACCCCAGTGACCCCCTGGAGCTCATAGTCTCAGGATCCT
TGGAGGATCCCAGGCCCTCACCCACAAGGTCCGTCTCAACAGCTGCAGGCCCTGA
GGACCAGCCCCTCATGCCTACAGGGTCAGTCCCCCACAGTGGTCTGAGAAGGCAC
TGGGAGGTACTGATCGGGGTCTTGGTGGTCTCCATCCTGCTTCTCTCCCTCCTCCTC
TTCCTCCTCCTCCAACACTGGCGTCAGGGAAAACACAGGACATTGGCCCAGAGAC
AGGCTGATTTCCAACGTCCTCCAGGGGCTGCCGAGCCAGAGCCCAAGGACGGGGG
CCTACAGAGGAGGTCCAGCCCAGCTGCTGACGTCCAGGGAGAAAACTTCTCAGGT
GCTGCCGTGAAGAACACACAGCCTGAGGACGGGGTGGAAATGGACACTCGGCAG
AGCCCACACGATGAAGACCCCCAGGCAGTGACGTATGCCAAGGTGAAACACTCC
AGACCTAGGAGAGAAATGGCCTCTCCTCCCTCCCCACTGTCTGGGGAATTCCTGG
ACACAAAGGACAGACAGGCAGAAGAGGACAGACAGATGGACACTGAGGCTGCTG
CATCTGAAGCCCCCCAGGATGTGACCTACGCCCAGCTGCACAGCTTTACCCTCAG
ACAGAAGGCAACTGAGCCTCCTCCATCCCAGGAAGGGGCCTCTCCAGCTGAGCCC
AGTGTCTATGCCACTCTGGCCATCCACTAA; Transcript ID ENST00000614699; Homo
sapiens
102:
MIPTFTALLCLGLSLGPRTHMQAGPLPKPTLWAEPGSVISWGNSVTIWCQGTLEAREY
RLDKEESPAPWDRQNPLEPKNKARFSIPSMTEDYAGRYRCYYRSPVGWSQPSDPLEL
VMTGAYSKPTLSALPSPLVTSGKSVTLLCQSRSPMDTFLLIKERAAHPLLHLRSEHGA
QQHQAEFPMSPVTSVHGGTYRCFSSHGFSHYLLSHPSDPLELIVSGSLEDPRPSPTRSVS
TAAGPEDQPLMPTGSVPHSGLRRHWEVLIGVLVVSILLLSLLLFLLLQHWRQGKHRTL
AQRQADFORPPGAAEPEPKDGGLQRRSSPAADVQGENFSGAAVKNTQPEDGVEMDT
RQSPHDEDPQAVTYAKVKHSRPRREMASPPSPLSGEFLDTKDRQAEEDRQMDTEAAA
SEAPQDVTYAQLHSFTLRQKATEPPPSQEGASPAEPSVYATLAIH; LILRB4 protein
(ENSP00000478542) encoded by Transcript ID ENST00000614699 from Gene ID
ENSG00000275730; Homo sapiens
103:
ATGATCCCCACCTTCACGGCTCTGCTCTGCCTCGGGCTGAGTCTGGGCCCCAGGAC
CCACATGCAGGCAGGGCCCCTCCCCAAACCCACCCTCTGGGCTGAGCCAGGCTCT
GTGATCAGCTGGGGGAACTCTGTGACCATCTGGTGTCAGGGGACCCTGGAGGCTC
GGGAGTACCGTCTGGATAAAGAGGAAAGCCCAGCACCCTGGGACAGACAGAACC
CACTGGAGCCCAAGAACAAGGCCAGATTCTCCATCCCATCCATGACAGAGGACTA
TGCAGGGAGATACCGCTGTTACTATCGCAGCCCTGTAGGCTGGTCACAGCCCAGT
GACCCCCTGGAGCTGGTGATGACAGGAGCCTACAGTAAACCCACCCTTTCAGCCC
TGCCGAGTCCTCTTGTGACCTCAGGAAAGAGCGTGACCCTGCTGTGTCAGTCACG
GAGCCCAATGGACACTTTCCTTCTGATCAAGGAGCGGGCAGCCCATCCCCTACTG
CATCTGAGATCAGAGCACGGAGCTCAGCAGCACCAGGCTGAATTCCCCATGAGTC
CTGTGACCTCAGTGCACGGGGGGACCTACAGGTGCTTCAGCTCACACGGCTTCTC
CCACTACCTGCTGTCACACCCCAGTGACCCCCTGGAGCTCATAGTCTCAGGATCCT
TGGAGGATCCCAGGCCCTCACCCACAAGGTCCGTCTCAACAGCTGCAGGCCCTGA
GGACCAGCCCCTCATGCCTACAGGGTCAGTCCCCCACAGTGGTCTGAGAAGGCAC
TGGGAGGTACTGATCGGGGTCTTGGTGGTCTCCATCCTGCTTCTCTCCCTCCTCCTC
TTCCTCCTCCTCCAACACTGGCGTCAGGGAAAACACAGGACATTGGCCCAGAGAC
AGGCTGATTTCCAACGTCCTCCAGGGGCTGCCGAGCCAGAGCCCAAGGACGGGGG
CCTACAGAGGAGGTCCAGCCCAGCTGCTGACGTCCAGGGAGAAAACTTCTGTGCT
GCCGTGAAGAACACACAGCCTGAGGACGGGGTGGAAATGGACACTCGGAGCCCA
CACGATGAAGACCCCCAGGCAGTGACGTATGCCAAGGTGAAACACTCCAGACCTA
GGAGAGAAATGGCCTCTCCTCCCTCCCCACTGTCTGGGGAATTCCTGGACACAAA
GGACAGACAGGCAGAAGAGGACAGACAGATGGACACTGAGGCTGCTGCATCTGA
AGCCCCCCAGGATGTGACCTACGCCCAGCTGCACAGCTTTACCCTCAGACAGAAG
GCAACTGAGCCTCCTCCATCCCAGGAAGGGGCCTCTCCAGCTGAGCCCAGTGTCT
ATGCCACTCTGGCCATCCACTAA; Transcript ID ENST00000621693; Homo sapiens
104:
MIPTFTALLCLGLSLGPRTHMQAGPLPKPTLWAEPGSVISWGNSVTIWCQGTLEAREY
RLDKEESPAPWDRONPLEPKNKARFSIPSMTEDYAGRYRCYYRSPVGWSQPSDPLEL
VMTGAYSKPTLSALPSPLVTSGKSVTLLCQSRSPMDTFLLIKERAAHPLLHLRSEHGA
QQHQAEFPMSPVTSVHGGTYRCFSSHGFSHYLLSHPSDPLELIVSGSLEDPRPSPTRSVS
TAAGPEDQPLMPTGSVPHSGLRRHWEVLIGVLVVSILLLSLLLFLLLQHWRQGKHRTL
AQRQADFQRPPGAAEPEPKDGGLQRRSSPAADVQGENFCAAVKNTQPEDGVEMDTR
SPHDEDPQAVTYAKVKHSRPRREMASPPSPLSGEFLDTKDRQAEEDRQMDTEAAASE
APQDVTYAQLHSFTLRQKATEPPPSQEGASPAEPSVYATLAIH; LILRB4 protein
(ENSP00000482234) encoded by Transcript ID ENST00000621693 from Gene ID
ENSG00000275730; Homo sapiens
105:
ATGGGGCGCCTGGCCTCGAGGCCGCTGCTGCTGGCGCTCCTGTCGTTGGCTCTTTG
CCGAGGGCGTGTGGTGAGAGTCCCCACAGCGACCCTGGTTCGAGTGGTGGGCACT
GAGCTGGTCATCCCCTGCAACGTCAGTGACTATGATGGCCCCAGCGAGCAAAACT
TTGACTGGAGCTTCTCATCTTTGGGGAGCAGCTTTGTGGAGCTTGCAAGCACCTGG
GAGGTGGGGTTCCCAGCCCAGCTGTACCAGGAGCGGCTGCAGAGGGGCGAGATC
CTGTTAAGGCGGACTGCCAACGACGCCGTGGAGCTCCACATAAAGAACGTCCAGC
CTTCAGACCAAGGCCACTACAAATGTTCAACCCCCAGCACAGATGCCACTGTCCA
GGGAAACTATGAGGACACAGTGCAGGTTAAAGTGCTGGCCGACTCCCTGCACGTG
GGCCCCAGCGCGCGGCCCCCGCCGAGCCTGAGCCTGCGGGGGGGGAGCCCTTCG
AGCTGCGCTGCACCGCCGCCTCCGCCTCGCCGCTGCACACGCACCTGGCGCTGCT
GTGGGAGGTGCACCGCGGCCCGGCCAGGCGGAGCGTCCTCGCCCTGACCCACGAG
GGCAGGTTCCACCCGGGOCTGGGGTACGAGCAGCGCTACCACAGTGGGGACGTGC
GCCTCGACACCGTGGGCAGCGACGCCTACCGCCTCTCAGTGTCCCGGGCTCTGTCT
GCCGACCAGGGCTCCTACAGGTGTATCGTCAGCGAGTGGATCGCCGAGCAGGGCA
ACTGGCAGGAAATCCAAGAAAAGGCCGTGGAAGTTGCCACCGTGGTGATCCAGC
CATCAGTTCTGCGAGCAGCTGTGCCCAAGAATGTGTCTGTGGCTGAAGGAAAGGA
ACTGGACCTGACCTGTAACATCACAACAGACCGAGCCGATGACGTCCGGCCCGAG
GTGACGTGGTCCTTCAGCAGGATGCCTGACAGCACCCTACCTGGCTCCCGCGTGTT
GGCGCGGCTTGACCGTGATTCCCTGGTGCACAGCTCGCCTCATGTTGCTTTGAGTC
ATGTGGATGCACGCTCCTACCATTTACTGGTTCGGGATGTTAGCAAAGAAAACTCT
GGCTACTATTACTGCCACGTGTCCCTGTGGGCACCCGGACACAACAGGAGCTGGC
ACAAAGTGGCAGAGGCCGTGTCTTCCCCAGCTGGTGTGGGTGTGACCTGGCTAGA
ACCAGACTACCAGGTGTACCTGAATGCTTCCAAGGTCCCCGGGTTTGCGGATGAC
CCCACAGAGCTGGCATGCCGGGTGGTGGACACGAAGAGTGGGGAGGCGAATGTC
CGATTCACGGTTTCGTGGTACTACAGGATGAACCGGCGCAGCGACAATGTGGTGA
CCAGCGAGCTGCTTGCAGTCATGGACGGGGACTGGACGCTAAAATATGGAGAGA
GGAGCAAGCAGCGGGCCCAGGATGGAGACTTTATTTTTTCTAAGGAACATACAGA
CACGTTCAATTTCCGGATCCAAAGGACTACAGAGGAAGACAGAGGCAATTATTAC
TGTGTTGTGTCTGCCTGGACCAAACAGCGGAACAACAGCTGGGTGAAAAGCAAGG
ATGTCTTCTCCAAGCCTGTTAACATATTTTGGGCATTAGAAGATTCCGTGCTTGTG
GTGAAGGCGAGGCAGCCAAAGCCTTTCTTTGCTGCCGGAAATACATTTGAGATGA
CTTGCAAAGTATCTTCCAAGAATATTAAGTCGCCACGCTACTCTGTTCTCATCATG
GCTGAGAAGCCTGTCGGCGACCTCTCCAGTCCCAATGAAACGAAGTACATCATCT
CTCTGGACCAGGATTCTGTGGTGAAGCTGGAGAATTGGACAGATGCATCACGGGT
GGATGGCGTTGTTTTAGAAAAAGTGCAGGAGGATGAGTTCCGCTATCGAATGTAC
CAGACTCAGGTCTCAGACGCAGGGCTGTACCGCTGCATGGTGACAGCCTGGTCTC
CTGTCAGGGGCAGCCTTTGGCGAGAAGCAGCAACCAGTCTCTCCAATCCTATTGA
GATAGACTTCCAAACCTCAGGTCCTATATTTAATGCTTCTGTGCATTCAGACACAC
CATCAGTAATTCGGGGAGATCTGATCAAATTGTTCTGTATCATCACTGTCGAGGGA
GCAGCACTGGATCCAGATGACATGGCCTTTGATGTGTCCTGGTTTGCGGTGCACTC
TTTTGGCCTGGACAAGGCTCCTGTGCTCCTGTCTTCCCTGGATCGGAAGGGCATCG
TGACCACCTCCCGGAGGGACTGGAAGAGCGACCTCAGCCTGGAGCGCGTGAGTGT
GCTGGAATTCTTGCTGCAAGTGCATGGCTCCGAGGACCAGGACTTTGGCAACTAC
TACTGTTCCGTGACTCCATGGGTGAAGTCACCAACAGGTTCCTGGCAGAAGGAGG
CAGAGATCCACTCCAAGCCCGTTTTTATAACTGTGAAGATGGATGTGCTGAACGC
CTTCAAGTATCCCTTGCTGATCGGCGTCGGTCTGTCCACGGTCATCGGGCTCCTGT
CCTGTCTCATCGGGTACTGCAGCTCCCACTGGTGTTGTAAGAAGGAGGTTCAGGA
GACACGGCGCGAGCGCCGCAGGCTCATGTCGATGGAGATGGACTAG; Transcript ID
ENST00000393203; Homo sapiens
106:
MGRLASRPLLLALLSLALCRGRVVRVPTATLVRVVGTELVIPCNVSDYDGPSEQNFD
WSFSSLGSSFVELASTWEVGFPAQLYQERLQRGEILLRRTANDAVELHIKNVQPSDQG
HYKCSTPSTDATVQGNYEDTVQVKVLADSLHVGPSARPPPSLSLREGEPFELRCTAAS
ASPLHTHLALLWEVHRGPARRSVLALTHEGRFHPGLGYEQRYHSGDVRLDTVGSDA
YRLSVSRALSADQGSYRCIVSEWIAEQGNWQEIQEKAVEVATVVIQPSVLRAAVPKN
VSVAEGKELDLTCNITTDRADDVRPEVTWSFSRMPDSTLPGSRVLARLDRDSLVHSSP
HVALSHVDARSYHLLVRDVSKENSGYYYCHVSLWAPGHNRSWHKVAEAVSSPAGV
GVTWLEPDYQVYLNASKVPGFADDPTELACRVVDTKSGEANVRFTVSWYYRMNRR
SDNVVTSELLAVMDGDWTLKYGERSKQRAQDGDFIFSKEHTDTFNFRIQRTTEEDRG
NYYCVVSAWTKQRNNSWVKSKDVFSKPVNIFWALEDSVLVVKARQPKPFFAAGNTF
EMTCKVSSKNIKSPRYSVLIMAEKPVGDLSSPNETKYHISLDQDSVVKLENWTDASRV
DGVVLEKVQEDEFRYRMYQTQVSDAGLYRCMVTAWSPVRGSLWREAATSLSNPIEI
DFQTSGPIFNASVHSDTPSVIRGDLIKLFCIITVEGAALDPDDMAFDVSWFAVHSFGLD
KAPVLLSSLDRKGIVTTSRRDWKSDLSLERVSVLEFLLQVHGSEDQDFGNYYCSVTP
WVKSPTGSWQKEAEIHSKPVFITVKMDVLNAFKYPLLIGVGLSTVIGLLSCLIGYCSSH
WCCKKEVQETRRERRRLMSMEMD; PTGFRN protein (ENSP00000376899) encoded by
Transcript ID ENST00000393203 from Gene ID ENSG00000134247; Homo sapiens
107:
ATGGCAGTGGGGGCCAGTGGTCTAGAAGGAGATAAGATGGCTGGTGCCATGCCTC
TGCAACTCCTCCTGTTGCTGATCCTACTGGGCCCTGGCAACAGCTTGCAGCTGTGG
GACACCTGGGCAGATGAAGCCGAGAAAGCCTTGGGTCCCCTGCTTGCCCGGGACC
GGAGACAGGCCACCGAATATGAGTACCTAGATTATGATTTCCTGCCAGAAACGGA
GCCTCCAGAAATGCTGAGGAACAGCACTGACACCACTCCTCTGACTGGGCCTGGA
ACCCCTGAGTCTACCACTGTGGAGCCTGCTGCAAGGCGTTCTACTGGCCTGGATGC
AGGAGGGGCAGTCACAGAGCTGACCACGGAGCTGGCCAACATGGGGAACCTGTC
CACGGATTCAGCAGCTATGGAGATACAGACCACTCAACCAGCAGCCACGGAGGC
ACAGACCACTCAACCAGTGCCCACGGAGGCACAGACCACTCCACTGGCAGCCACA
GAGGCACAGACAACTCGACTGACGGCCACGGAGGCACAGACCACTCCACTGGCA
GCCACAGAGGCACAGACCACTCCACCAGCAGCCACGGAAGCACAGACCACTCAA
CCCACAGGCCTGGAGGCACAGACCACTGCACCAGCAGCCATGGAGGCACAGACC
ACTGCACCAGCAGCCATGGAAGCACAGACCACTCCACCAGCAGCCATGGAGGCA
CAGACCACTCAAACCACAGCCATGGAGGCACAGACCACTGCACCAGAAGCCACG
GAGGCACAGACCACTCAACCCACAGCCACGGAGGCACAGACCACTCCACTGGCA
GCCATGGAGGCCCTGTCCACAGAACCCAGTGCCACAGAGGCCCTGTCCATGGAAC
CTACTACCAAAAGAGGTCTGTTCATACCCTTTTCTGTGTCCTCTGTTACTCACAAG
GGCATTCCCATGGCAGCCAGCAATTTGTCCGTCAACTACCCAGTGGGGGCCCCAG
ACCACATCTCTGTGAAGCAGTGCCTGCTGGCCATCCTAATCTTGGCGCTGGTGGCC
ACTATCTTCTTCGTGTGCACTGTGGTGCTGGCGGTCCGCCTCTCCCGCAAGGGCCA
CATGTACCCCGTGCGTAATTACTCCCCCACCGAGATGGTCTGCATCTCATCCCTGT
TGCCTGATGGGGGTGAGGGGCCCTCTGCCACAGCCAATGGGGGCCTGTCCAAGGC
CAAGAGCCCGGGCCTGACGCCAGAGCCCAGGGAGGACCGTGAGGGGGATGACCT
CACCCTGCACAGCTTCCTCCCTTAG; Transcript ID ENST00000228463; Homo sapiens
108:
MAVGASGLEGDKMAGAMPLQLLLLLILLGPGNSLQLWDTWADEAEKALGPLLARD
RRQATEYEYLDYDFLPETEPPEMLRNSTDTTPLTGPGTPESTTVEPAARRSTGLDAGG
AVTELTTELANMGNLSTDSAAMEIQTTQPAATEAQTTQPVPTEAQTTPLAATEAQTTR
LTATEAQTTPLAATEAQTTPPAATEAQTTQPTGLEAQTTAPAAMEAQTTAPAAMEAQ
TTPPAAMEAQTTOTTAMEAQTTAPEATEAQTTOPTATEAQTTPLAAMEALSTEPSAT
EALSMEPTTKRGLFIPFSVSSVTHKGIPMAASNLSVNYPVGAPDHISVKQCLLAILILAL
VATIFFVCTVVLAVRLSRKGHMYPVRNYSPTEMVCISSLLPDGGEGPSATANGGLSKA
KSPGLTPEPREDREGDDLTLHSFLP; SELPLG protein (ENSP00000228463) encoded by
Transcript ID ENST00000228463 from Gene ID ENSG00000110876; Homo sapiens
109:
ATGCCTCTGCAACTCCTCCTGTTGCTGATCCTACTGGGCCCTGGCAACAGCTTGCA
GCTGTGGGACACCTGGGCAGATGAAGCCGAGAAAGCCTTGGGTCCCCTGCTTGCC
CGGGACCGGAGACAGGCCACCGAATATGAGTACCTAGATTATGATTTCCTGCCAG
AAACGGAGCCTCCAGAAATGCTGAGGAACAGCACTGACACCACTCCTCTGACTGG
GCCTGGAACCCCTGAGTCTACCACTGTGGAGCCTGCTGCAAGGCGTTCTACTGGG
CTGGATGCAGGAGGGGCAGTCACAGAGCTGACCACGGAGCTGGCCAACATGGGG
AACCTGTCCACGGATTCAGCAGCTATGGAGATACAGACCACTCAACCAGCAGCCA
CGGAGGCACAGACCACTCAACCAGTGCCCACGGAGGCACAGACCACTCCACTGG
CAGCCACAGAGGCACAGACAACTCGACTGACGGCCACGGAGGCACAGACCACTC
CACTGGCAGCCACAGAGGCACAGACCACTCCACCAGCAGCCACGGAAGCACAGA
CCACTCAACCCACAGGCCTGGAGGCACAGACCACTGCACCAGCAGCCATGGAGG
CACAGACCACTGCACCAGCAGCCATGGAAGCACAGACCACTCCACCAGCAGCCAT
GGAGGCACAGACCACTCAAACCACAGCCATGGAGGCACAGACCACTGCACCAGA
AGCCACGGAGGCACAGACCACTCAACCCACAGCCACGGAGGCACAGACCACTCC
ACTGGCAGCCATGGAGGCCCTGTCCACAGAACCCAGTGCCACAGAGGCCCTGTCC
ATGGAACCTACTACCAAAAGAGGTCTGTTCATACCCTTTTCTGTGTCCTCTGTTAC
TCACAAGGGCATTCCCATGGCAGCCAGCAATTTGTCCGTCAACTACCCAGTGGGG
GCCCCAGACCACATCTCTGTGAAGCAGTGCCTGCTGGCCATCCTAATCTTGGCGCT
GGTGGCCACTATCTTCTTCGTGTGCACTGTGGTGCTGGGGGTCCGCCTCTCCCGCA
AGGGCCACATGTACCCCGTGCGTAATTACTCCCCCACCGAGATGGTCTGCATCTCA
TCCCTGTTGCCTGATGGGGGTGAGGGGCCCTCTGCCACAGCCAATGGGGGCCTGT
CCAAGGCCAAGAGCCCGGGCCTGACGCCAGAGCCCAGGGAGGACCGTGAGGGGG
ATGACCTCACCCTGCACAGCTTCCTCCCTTAG; Transcript ID ENST00000550948;
Homo sapiens
110:
MPLQLLLLLILLGPGNSLQLWDTWADEAEKALGPLLARDRRQATEYEYLDYDFLPET
EPPEMLRNSTDTTPLTGPGTPESTTVEPAARRSTGLDAGGAVTELTTELANMGNLSTD
SAAMEIQTTQPAATEAQTTQPVPTEAQTTPLAATEAQTTRLTATEAQTTPLAATEAQT
TPPAATEAQTTQPTGLEAQTTAPAAMEAQTTAPAAMEAQTTPPAAMEAQTTQTTAM
EAQTTAPEATEAQTTQPTATEAQTTPLAAMEALSTEPSATEALSMEPTTKRGLFIPFSV
SSVTHKGIPMAASNLSVNYPVGAPDHISVKQCLLAILILALVATIFFVCTVVLAVRLSR
KGHMYPVRNYSPTEMVCISSLLPDGGEGPSATANGGLSKAKSPGLTPEPREDREGDDL
TLHSFLP; SELPLG protein (ENSP00000447752) encoded by Transcript ID
ENST00000550948 from Gene ID ENSG00000110876; Homo sapiens
*based on assembled sequence in Genome Reference Consortium Human Build 38 patch release 13 (GRCh38.p13; GenBank assembly accession GCA_000001405.28 and RefSeq assembly accession GCF_000001405.39); note multiple listings for the same vesicle localization moiety reflect different transcripts (different ENST numbers) resulting potentially in multiple isoforms of a vesicle localization moiety when transcripts differ outside the 5′ and 3′ untranslated region (UTR) (i.e., differ in the coding sequences).

TABLE 3
Additional VLM which may be used as a VLM or used
to produce a chimeric VLM^{#, @}

Gene Symbol; Protein (PROT ID NO); Sequence Identifiers
ACE; P12821 (1); ENST00000290866, ENST00000290863, ENST00000413513
ADAM15; Q13444 (2); ENST00000529473, ENST00000526491, ENST00000356955,
ENST00000449910, ENST00000359280, ENST00000360674, ENST00000368412,
ENST00000355956, ENST00000271836, ENST00000368413, ENST00000531455,
ENST00000447332
ADAM9; Q13443 (3); ENST00000487273, ENST00000379917
AGRN; O00468 (4); ENST00000379370
ANPEP; P15144 (5); ENST00000300060
ANTXR2; P58335 (6); ENST00000403729, ENST00000346652, ENST00000307333
ATP1A1; P05023 (7); ENST00000295598, ENST00000369496, ENST00000537345
ATP1B3; P54709 (8); ENST00000286371
BSG; P35613 (9); ENST00000545507, ENST00000346916, ENST00000333511,
ENST00000353555
BTN2A1; Q7KYR7 (10); ENST00000312541, ENST00000429381, ENST00000469185,
ENST00000541522
CALM1; P0DP23 (11); ENST00000356978
CANX; P27824 (12); ENST00000504734, ENST00000247461, ENST00000452673,
ENST00000638425, ENST00000639938, ENST00000638706
CD151; P48509 (13); ENST00000322008, ENST00000397420, ENST00000530726,
ENST00000397421
CD19; P15391 (14); ENST00000538922, ENST00000324662
CD1A; P06126 (15); ENST00000289429
CD1B; P29016 (16); ENST00000368168
CD1C; P29017 (17); ENST00000368170
CD2; P06729 (18); ENST00000369478
CD200; P41217 (19); ENST00000473539, ENST00000315711
CD200R1; Q8TD46 (20); ENST00000471858, ENST00000308611, ENST00000440122,
ENST00000490004
CD226; Q15762 (21); ENST00000280200, ENST00000582621
CD247; P20963 (22); ENST00000362089, ENST00000392122
CD274; Q9NZQ7 (23); ENST00000381577, ENST00000381573
CD276; Q5ZPR3 (24); ENST00000318443, ENST00000561213, ENST00000564751,
ENST00000318424
CD33; P20138 (25); ENST00000421133, ENST00000391796, ENST00000262262
CD34; P28906 (26); ENST00000310833, ENST00000356522
CD36; P16671 (27); ENST00000435819, ENST00000309881, ENST00000394788,
ENST00000447544, ENST00000433696, ENST00000432207, ENST00000538969,
ENST00000544133
CD37; P11049 (28); ENST00000598095, ENST00000426897, ENST00000323906
CD3E; P07766 (29); ENST00000361763
CD40; P25942 (30); ENST00000372285, ENST00000372276
CD40LG; P29965 (31); ENST00000370629
CD44; P16070 (32); ENST00000263398, ENST00000428726, ENST00000415148,
ENST00000433892, ENST00000278386, ENST00000434472, ENST00000352818
CD47; Q08722 (33); ENST00000355354, ENST00000361309
CD53; P19397 (34); ENST00000648608, ENST00000271324
CD58; P19256 (35); ENST00000369489, ENST00000464088, ENST00000457047
CD63; P08962 (36); ENST00000546939, ENST00000552692, ENST00000549117,
ENST00000257857, ENST00000552754, ENST00000550776, ENST00000420846
CD81; P60033 (37); ENST00000263645
CD82; P27701 (38); ENST00000227155, ENST00000342935
CD84; Q9UIB8 (39); ENST00000368054, ENST00000368048, ENST00000311224,
ENST00000368051, ENST00000534968
CD86; P42081 (40); ENST00000469710, ENST00000493101, ENST00000330540
ENST00000393627, ENST00000264468
CD9; P21926 (41); ENST00000382518, ENST00000538834, ENST00000009180
CHMP1A; Q9HD42 (42); ENST00000397901
CHMP1B; Q7LBR1 (43); ENST00000526991
CHMP2A; O43633 (44); ENST00000600118, ENST00000601220, ENST00000312547
CHMP3; Q9Y3E7 (45); ENST00000263856, ENST00000409727, ENST00000409225
CHMP4A; Q9BY43 (46); ENST00000347519, ENST00000609024, ENST00000645308,
ENST00000645179
CHMP4B; Q9H444 (47); ENST00000217402
CHMP5; Q9NZZ3 (48); ENST00000223500, ENST00000419016
CHMP6; Q96FZ7 (49); ENST00000325167
COL6A1; P12109 (50); ENST00000361866
CR1; P17927 (51); ENST00000400960, ENST00000367051, ENST00000367053
CSF1R; P07333 (52); ENST00000286301, ENST00000543093
CXCR4; P61073 (53); ENST00000409817, ENST00000241393
DDOST; P39656 (54); ENST00000375048, ENST00000415136
DLL1; O00548 (55); ENST00000616526, ENST00000366756
DLL4; Q9NR61 (56); ENST00000249749
DSG1; Q02413 (57); ENST00000257192
EMB; Q6PCB8 (58); ENST00000303221, ENST00000514111
ENG; P17813 (59); ENST00000373203, ENST00000344849
EVI2B; P34910 (60); ENST00000330927, ENST00000577894
F11R; Q9Y624 (61); ENST00000368026, ENST00000537746
FASN; P49327 (62); ENST00000306749
FCER1G; P30273 (63); ENST00000289902
FCGR2C; P31995 (64); * P31995-1, P31995-2, P31995-3, P31995-4
FLOT1; O75955 (65); ENST00000436822, ENST00000383562, ENST00000376389,
ENST00000444632, ENST00000383382
FLOT2; Q14254 (66); ENST00000394908
FLT3; P36888 (67); ENST00000241453
FN1; P02751 (68); ENST00000421182, ENST00000323926, ENST00000336916,
ENST00000357867, ENST00000354785, ENST00000446046, ENST00000443816,
ENST00000432072, ENST00000356005, ENST00000426059, ENST00000359671
GAPDH; P04406 (69); ENST00000229239, ENST00000396861, ENST00000396859,
ENST00000396858, ENST00000619601
GLG1; Q92896 (70); ENST00000205061, ENST00000422840, ENST00000447066
GRIA2; P42262 (71); ENST00000507898, ENST00000393815, ENST00000645636,
ENST00000296526, ENST00000264426
GRIA3; P42263 (72); ENST00000541091, ENST00000620443, ENST00000622768
GYPA; P02724 (73); ENST00000324022, ENST00000646447, ENST00000642713
HSPG2; P98160 (74); ENST00000374695
ICAM1; P05362 (75); ENST00000264832
ICAM2; P13598 (76); ENST00000449662, ENST00000579788, ENST00000579687,
ENST00000412356, ENST00000418105
ICAM3; P32942 (77); ENST00000160262
IL1RAP; Q9NPH3 (78); ENST00000072516, ENST00000439062, ENST00000447382,
ENST00000422485, ENST00000422940, ENST00000413869, ENST00000342550,
ENST00000317757, ENST00000443369, ENST00000412504
IL5RA; Q01344 (79); ENST00000446632, ENST00000438560, ENST00000256452,
ENST00000383846, ENST00000311981, ENST00000430514, ENST00000456302
IST1; P53990 (80); ENST00000544564, ENST00000541571, ENST00000378799,
ENST00000329908, ENST00000538850, ENST00000378798, ENST00000606369,
ENST00000535424
ITGA2; P17301 (81); ENST00000296585
ITGA2B; P08514 (82); ENST00000262407
ITGA4; P13612 (83); ENST00000339307, ENST00000397033
ITGA5; P08648 (84); ENST00000293379
ITGA6; P23229 (85); ENST00000409532, ENST00000264107, ENST00000409080,
ENST00000442250, ENST00000458358
ITGAL; P20701 (86); ENST00000356798, ENST00000358164
ITGAM; P11215 (87); ENST00000648685, ENST00000544665
ITGAV; P06756 (88); ENST00000261023, ENST00000374907, ENST00000433736
ITGAX; P20702 (89); ENST00000268296
ITGB2; P05107 (90); ENST00000397852, ENST00000397857, ENST00000355153,
ENST00000397850, ENST00000302347
ITGB3; P05106 (91); ENST00000559488
ITGB4; P16144 (92); ENST00000579662, ENST00000200181, ENST00000450894,
ENST00000449880
ITGB5; P18084 (93); ENST00000296181
ITGB6; P18564 (94), ENST00000283249, ENST00000409967, ENST00000409872
ITGB7; P26010 (95); ENST00000267082, ENST00000422257, ENST00000550743
JAG1; P78504 (96); ENST00000254958
JAG2; Q9Y219 (97); ENST00000331782, ENST00000347004
KIT; P10721 (98); ENST00000412167, ENST00000288135
LGALS3BP; Q08380 (99); ENST00000262776
LILRA6; Q6PI73 (100); ENST00000613333, ENST00000621570, ENST00000616720,
ENST00000430421, ENST00000396365, ENST00000614434
LILRB1; Q8NHL6 (101); ENST00000616408, ENST00000618055, ENST00000618681,
ENST00000617686, ENST00000612636
LILRB2; Q8N423 (102); ENST00000619122, ENST00000621020, ENST00000614225,
ENST00000618705, ENST00000391748, ENST00000314446, ENST00000391746,
ENST00000391749, ENST00000434421, ENST00000617886, ENST00000617341,
ENST00000610886, ENST00000618392
LILRB3; O75022 (103); ENST00000611086, ENST00000391750, ENST00000245620,
ENST00000613698
LMAN2; Q12907 (104); ENST00000303127
LRRC25; Q8N386 (105); ENST00000339007, ENST00000595840
LY75; O60449 (106); ENST00000263636
M6PR; P20645 (107); ENST00000000412
MFGE8; Q08431 (108); ENST00000268151, ENST00000268150, ENST00000566497,
ENST00000542878
MMP14; P50281 (109); ENST00000311852
MPL; P40238 (110); ENST00000372470
MRC1; P22897 (111); ENST00000569591
MVB12B; Q9H7P6 (112); ENST00000361171, ENST00000489637
NECTIN1; Q15223 (113); ENST00000341398, ENST00000264025, ENST00000340882
NOMO1; Q15155 (114); ENST00000619292, ENST00000287667
NOTCH1; P46531 (115); ENST00000651671
NOTCH2; Q04721 (116); ENST00000256646
NOTCH3; Q9UM47 (117); ENST00000263388
NOTCH4; Q99466 (118); ENST00000457094, ENST00000375023, ENST00000425600,
ENST00000439349
NPTN; Q9Y639 (119); ENST00000345330, ENST00000351217, ENST00000562924,
ENST00000563691
NRP1; O14786 (120); ENST00000265371, ENST00000374821, ENST00000374822,
ENST00000374867
PDCD1; Q15116 (121); ENST00000618185, ENST00000334409
PDCD1LG2; Q9BQ51 (122); ENST00000397747
PDCD6IP; Q8WUM4 (123); ENST00000307296, ENST00000457054
PDGFRB; P09619 (124); ENST00000261799
PECAM1; P16284 (125); ENST00000563924
PLXNB2; O15031 (126); ENST00000449103, ENST00000359337
PLXND1; Q9Y4D7 (127); ENST00000324093
PROM1; O43490 (128); ENST00000505450, ENST00000508167, ENST00000510224,
ENST00000447510, ENST00000540805, ENST00000539194
PTGES2; Q9H7Z7 (129); ENST00000338961
PTPRA; P18433 (130); ENST00000380393, BNST00000216877, ENST00000318266,
ENST00000356147, ENST00000399903
PTPRC; P08575 (131); ENST00000573679, ENST00000573477, ENST00000348564,
ENST00000442510
PTPRJ; Q12913 (132); ENST00000418331, ENST00000440289
PTPRO; Q16827 (133); ENST00000281171, ENST00000543886, ENST00000348962,
ENST00000442921, ENST00000542557, ENST00000445537, ENST00000544244
RPN1; P04843 (134); ENST00000296255
SDC1; P18827 (135); ENST00000254351, ENST00000381150
SDC2; P34741 (136); ENST00000302190
SDC3; Q75056 (137); ENST00000339394
SDC4; P31431 (138); ENST00000372733
SDCBP; O00560 (139); ENST00000260130, ENST00000447182, ENST00000413219,
ENST00000424270
SDCBP2; Q9H190 (140); ENST00000381812, ENST00000381808, ENST00000339987,
ENST00000360779
SIGLEC7; Q9Y286 (141); ENST00000317643, ENST00000305628, ENST00000536156,
ENST00000600577
SIGLEC9; Q9Y336 (142); ENST00000250360, ENST00000440804
SIRPA; P78324 (143); ENST00000622179, ENST00000356025, ENST00000358771,
ENST00000400068
SLIT2; O94813 (144); ENST00000504154
SNF8; Q96H20 (145); ENST00000502492, ENST00000290330
SPN; P16150 (146); ENST00000395389, ENST00000563039, ENST00000652691,
ENST00000360121
STX3; Q13277 (147); ENST00000337979, ENST00000529177
TACSTD2; P09758 (148); ENST00000371225
TFRC; P02786 (149); ENST00000360110, ENST00000392396
TLR2; O60603 (150); ENST00000642580, ENST00000642700, ENST00000260010
TMED10; P49755 (151); ENST00000303575
TNFRSF8; P28908 (152); ENST00000263932, ENST00000413146, ENST00000417814
TRAC; P01848 (153); * P01848-1
TSG101; Q99816 (154); ENST00000251968
TSPAN14; Q8NG11 (155); ENST00000429989, ENST00000481124, ENST00000372164,
ENST00000372158, ENST00000372156, ENST00000616406
TSPAN7; P41732 (156); ENST00000378482
TSPAN8; P19075 (157); ENST00000393330, ENST00000247829, ENST00000546561
TYROBP; O43914 (158); ENST00000544690, ENST00000262629, ENST00000589517
VPS25; Q9BRG1 (159); ENST00000253794
VPS28; Q9UK41 (160); ENST00000529182, ENST00000526054, ENST00000292510,
ENST00000377348, ENST00000646588, ENST00000642202, ENST00000642867,
ENST00000643186
VPS36; Q86VN1 (161); ENST00000378060, ENST00000611132
VPS37A; Q8NEZ2 (162); ENST00000324849, ENST00000425020, ENST00000521829
VPS37B; Q9H9H4 (163); ENST00000267202
VPS37C; ASD8V6 (164); ENST00000301765
VPS37D; Q86XT2 (165); ENST00000324941
VPS4A; Q9UN37 (166); ENST00000254950
VPS4B; O75351 (167); ENST00000238497
VTI1A; Q96AJ9 (168); ENST00000393077
VTI1B; Q9UEU0 (169); ENST00000554659
^{#} and * UniProt Release 2019_11 (11 Dec. 2019); note amino acid sequence as well as functional and domain structure of vesicle localization moieties may be found under each accession number.
^{@}based on assembled sequence in Genome Reference Consortium Human Build 38 patch release 13 (GRCh38.p13; GenBank assembly accession GCA_000001405.28 and RefSeq assembly accession GCF_000001405.39); nucleic acid sequence coding a vesicle localization moiety may be found within sequence associated with an ENST number; note multiple ENST numbers associated with each vesicle localization moiety referred through its Gene Symbol or UniProtKB accession number potentially indicate multiple isoforms of a vesicle localization moiety.

TABLE 4
Chimeric VLM and LAMP2, CLSTN1 and IGSF VLM (without signal sequence)

SEQ ID NO: Sequence; Source
111:
CTCGAACTTAATTTGACCGATTCAGAGAATGCCACATGCCTTTATGCGAAATGGC
AGATGAATTTCACTGTTCGGTATGAAACCACAAATAAAACTTATAAAACCGTTAC
CATAAGCGACCATGGAACTGTGACCTATAATGGAAGCATATGTGGAGATGATCAG
AATGGTCCCAAAATTGCTGTTCAGTTCGGACCTGGTTTCTCCTGGATTGCTAATTT
TACTAAGGCAGCCTCTACCTATTCCATAGACTCAGTTTCTTTTAGTTACAACACAG
GGGATAACACAACGTTTCCTGATGCCGAAGATAAAGGCATACTCACCGTTGATGA
ACTCTTGGCCATCAGAATACCTCTTAATGACCTGTTTAGATGCAATAGCCTCTCCA
CCCTGGAGAAGAATGATGTGGTACAACACTACTGGGATGTGTTGGTTCAAGCTTT
TGTACAAAATGGGACCGTCTCTACAAATGAGTTCCTCTGTGATAAAGACAAAACC
AGTACTGTGGCACCAACCATACACACAACAGTGCCATCTCCAACGACCACCCCTA
CACCCAAGGAGAAACCTGAAGCCGGTACATATTCAGTGAATAATGGAAATGATAC
ATGCCTTCTGGCCACCATGGGCCTTCAGCTCAACATCACTCAGGATAAGGTCGCTT
CAGTCATTAACATTAACCCCAATACTACTCACTCTACAGGCTCTTGCAGGAGTCAC
ACGGCGCTCCTGCGGTTGAATAGCAGCACCATTAAGTATCTTGACTTTGTCTTTGC
TGTCAAGAATGAGAACAGATTTTATCTGAAAGAGGTCAACATCTCTATGTATTTG
GICAATGGGAGTGTGTTCTCCATTGCTAATAACAATCTCAGCTACTGGGATGCCCC
TCTGGGTTCTTCCTATATGTGCAACAAAGAGCAGACTGTTTCAGTGTCCGGCGCAT
TTCAGATTAATACTTTTGATCTTCGGGTGCAGCCTTTCAATGTGACACAAGGAAAG
TATTCCACCGCCCAAGAGTGTTCTTTGGATGATGACACCATACTGATCCCCATCAT
TGTAGGTGCCGGCCTGAGCGGCCTTATTATCGTTATCGTCATTGCATACGTGATTG
GACGGCGGAAATCTTATGCCGGTTATCAGACGCTT; Construct coding sequence from
vector 91 (for Lamp2 VLM); Artificial Sequence
112:
LELNLTDSENATCLYAKWQMNFTVRYETTNKTYKTVTISDHGTVTYNGSICGDDQN
GPKIAVQFGPGFSWIANFTKAASTYSIDSVSFSYNTGDNTTFPDAEDKGILTVDELLAIR
IPLNDLFRCNSLSTLEKNDVVQHYWDVLVQAFVQNGTVSTNEFLCDKDKTSTVAPTI
HTTVPSPTTTPTPKEKPEAGTYSVNNGNDTCLLATMGLQLNITQDKVASVININPNTT
HSTGSCRSHTALLRLNSSTIKYLDFVFAVKNENRFYLKEVNISMYLVNGSVFSIANNN
LSYWDAPLGSSYMCNKEQTVSVSGAFQINTFDLRVQPFNVTQGKYSTAQECSLDDDT,
ILIPIIVGAGLSGLIIVIVIA, YVIGRRKSYAGYQTL; Construct peptide sequence from
vector 91 (for Lamp2 VLM); Artificial Sequence
113:
GCACGCGTGAATAAACATAAACCGTGGTTGGAACCAACATATCATGGGATCGTTA
CCGAAAATGATAATACAGTACTTCTGGATCCACCTCTCATTGCTTTGGACAAGGAC
GCACCCCTCAGGTTCGCTGAATCATTCGAAGTTACCGTTACGAAGGAAGGGGAAA
TATGCGGTTTCAAGATCCATGGTCAAAACGTTCCTTTCGACGCCGTCGTGGTTGAC
AAGAGCACCGGCGAAGGGGTTATAAGATCTAAGGAAAAGCTCGATTGCGAACTT
CAAAAGGATTACAGCTTTACTATACAAGCGTACGACTGCGGCAAAGGGCCCGACG
GGACAAATGTTAAGAAATCCCACAAGGCCACGGTCCACATCCAAGTCAATGATGT
TAACGAATATGCACCTGTTTTCAAAGAGAAAAGCTATAAGGCTACTGTGATAGAA
GGAAAACAATATGATAGTATCCTGAGAGTCGAAGCTGTCGACGCAGATTGTAGCC
CACAATTTTCCCAAATATGTTCCTATGAGATTATAACACCTGATGTCCCTTTCACC
GTAGATAAGGACGGATACATCAAGAATACTGAAAAGCTGAATTATGGTAAAGAG
CACCAGTACAAACTCACGGTGACGGCGTACGATTGCGGAAAGAAGCGTGCAACT
GAGGACGTACTTGTTAAAATTAGTATCAAACCGACGTGTACACCAGGCTGGCAGG
GCTGGAATAATCGGATCGAATACGAACCCGGAACAGGAGCACTGGCTGTGTTCCC
TAACATTCATCTCGAAACTTGCGATGAACCTGTGGCAAGCGTCCAAGCTACGGTA
GAACTGGAGACATCTCATATTGGTAAGGGATGTGATAGAGATACTTATAGCGAGA
AAAGCCTTCATCGCTTGTGCGGCGCCGCAGCCGGAACAGCAGAACTCTTGCCTTC
TCCCTCTGGCAGCCTTAATTGGACTATGGGATTGCCTACTGATAACGGTCATGATT
CCGATCAAGTCTTCGAATTTAATGGAACACAAGCTGTACGCATTCCTGACGGAGT
GGTAAGTGTTTCTCCGAAGGAACCCTTTACAATTAGCGTATGGATGCGCCACGGC
CCCTTTGGACGGAAGAAAGAAACTATCCTGTGTAGCTCAGACAAGACTGACATGA
ACCGCCATCATTATTCTTTGTACGTACATGGTTGTCGTCTTATTTTCCTGTTTCGCC
AAGACCCATCCGAAGAAAAGAAGTATAGGCCCGCCGAATTTCATTGGAAACTCAA
CCAAGTGTGCGACGAAGAGTGGCATCATTATGTTCTGAACGTTGAGTTTCCATCCG
TCACACTGTACGTCGACGGTACCAGCCATGAACCATTTAGTGTCACAGAAGACTA
TCCCCTGCACCCGAGTAAAATCGAGACGCAACTGGTTGTCGGCGCATGTTGGCAG
GAATTTAGTGGCGTCGAGAACGATAACGAGACCGAACCCGTCACCGTAGCGTCCG
CCGGCGGGGATCTCCATATGACGCAATTCTTTCGGGGTAACTTGGCCGGGCTGAC
ACTGCGCTCTGGCAAGCTGGCTGACAAGAAAGTTATTGATTGCTTGTACACGTGT
AAAGAAGGCCTTGATCTCCAAGTTCTGGAAGATTCAGGACGAGGGGTCCAAATTC
AGGCTCATCCATCCCAACTGGTGCTTACACTGGAAGGCGAGGATCTGGGAGAGCT
GGACAAAGCTATGCAACATATTTCCTATCTCAATAGTCGCCAATTTCCAACACCTG
GCATCCGACGACTGAAGATTACGTCAACCATTAAATGCTTCAATGAAGCAACATG
TATCAGCGTGCCACCTGTGGACGGATATGTTATGGTACTGCAACCTGAAGAACCA
AAGATTTCCCTCTCTGGGGTTCATCACTTCGCAAGGGCCGCAAGTGAGTTCGAGTC
CTCTGAGGGAGTCTTTCTCTTTCCCGAACTGCGGATAATAAGTACTATTACAAGGG
AAGTCGAACCAGAGGGAGATGGAGCCGAAGATCCAACCGTGCAGGAGTCTCTCG
TATCAGAAGAAATTGTCCATGATCTTGACACGTGCGAAGTGACAGTAGAAGGGGA
AGAACTCAATCATGAACAAGAATCATTGGAAGTAGATATGGCACGATTGCAACAA
AAGGGAATCGAGGTCTCCTCATCCGAGCTTGGTATGACTTTTACTGGAGTAGATA
CGATGGCTTCCTATGAAGAAGTGCTGCATCTTCTCAGATACCGCAATTGGCACGC
GCGTTCTCTGCTGGACAGAAAATTCAAACTGATTTGTAGCGAACTTAACGGACGG
TACATATCTAATGAGTTCAAAGTAGAAGTTAACGTGATTCATACTGCAAATCCTAT
GGAGCATGCGGCCGCTGCCGCCGCTCAACCTCAATTTGTCCATCCCGAGCATAGG
TCATTCGTGGATCTCTCTGGTCATAATTTGGCAAATCCACATCCCTTTGCTGTGGTT
CCATCTACAGCAACTGTAGTTATTGTAGTATGTGTGTCCTTTCTCGTCTTTATGATC
ATATTGGGCGTCTTCCGCATAAGAGCGGCCCACAGGAGAACAATGAGGGACCAA
GATACAGGAAAAGAAAATGAAATGGATTGGGATGATAGCGCACTCACAATAACG
GTGAATCCAATGGAAACGTACGAAGATCAACATTCTAGCGAAGAAGAAGAAGAG
GAAGAGGAAGAGGAAGAGTCAGAAGATGGAGAAGAGGAAGACGATATTACATC
AGCTGAAAGCGAATCTTCAGAAGAAGAAGAAGGTGAACAAGGTGATCCTCAAAA
TGCCACACGCCAACAACAACTCGAATGGGACGATTCTACATTGTCCTAT; Construct
coding sequence from vector 112 (for CLSTN1 VLM); Artificial Sequence
114:
ARVNKHKPWLEPTYHGIVTENDNTVLLDPPLIALDKDAPLRFAESFEVTVTKEGEICG
FKIHGQNVPFDAVVVDKSTGEGVIRSKEKLDCELQKDYSFTIQAYDCGKGPDGTNVK
KSHKATVHIQVNDVNEYAPVFKEKSYKATVIEGKQYDSILRVEAVDADCSPQFSQICS
YEIITPDVPFTVDKDGYIKNTEKLNYGKEHQYKLTVTAYDCGKKRATEDVLVKISIKP
TCTPGWQGWNNRIEYEPGTGALAVFPNIHLETCDEPVASVQATVELETSHIGKGCDR
DTYSEKSLHRLCGAAAGTAELLPSPSGSLNWTMGLPTDNGHDSDQVFEFNGTQAVRI
PDGVVSVSPKEPFTISVWMRHGPFGRKKETILCSSDKTDMNRHHYSLYVHGCRLIFLF
RQDPSEEKKYRPAEFHWKLNQVCDEEWHHYVLNVEFPSVTLYVDGTSHEPFSVTED
YPLHPSKIETQLVVGACWQEFSGVENDNETEPVTVASAGGDLHMTQFFRGNLAGLTL
RSGKLADKKVIDCLYTCKEGLDLQVLEDSGRGVQIQAHPSQLVLTLEGEDLGELDKA
MQHISYLNSRQFPTPGIRRLKITSTIKCFNEATCISVPPVDGYVMVLQPEEPKISLSGVH
HFARAASEFESSEGVFLFPELRIISTITREVEPEGDGAEDPTVQESLVSEEIVHDLDTCEV
TVEGEELNHEQESLEVDMARLQQKGIEVSSSELGMTFTGVDTMASYEEVLHLLRYRN
WHARSLLDRKFKLICSELNGRYISNEFKVEVNVIHTANPMEHAAAAAAQPQFVHPEH
RSFVDLSGHNLANPHPFAVVPST, ATVVIVVCVSFLVFMIILGVF,
RIRAAHRRTMRDQDTGKENEMDWDDSALTITVNPMETYEDQHSSEEEEEEEEEEESE
DGEEEDDITSAESESSEEEEGEQGDPQNATRQQQLEWDDSTLSY; Construct peptide
sequence from vector 112 (for CLSTN1 VLM); Artificial Sequence
115:
TTGGAACTTAATTTGACAGATTCAGAAAATGCCACTTGCCTTTATGCAAAATGGCA
GATGAATTTCACAGTACGCTATGAAACTACAAATAAAACTTATAAAACTGTAACC
ATTTCAGACCATGGCACTGTGACATATAATGGAAGCATTTGTGGGGATGATCAGA
ATGGTCCCAAAATAGCAGTGCAGTTCGGACCTGGCTTTTCCTGGATTGCGAATTTT
ACCAAGGCAGCATCTACTTATTCAATTGACAGCGTCTCATTTTCCTACAACACTGG
TGATAACACAACATTTCCTGATGCTGAAGATAAAGGAATTCTTACTGTTGATGAA
CTTTTGGCCATCAGAATTCCATTGAATGACCTTTTTAGATGCAATAGTTTATCAAC
TTTGGAAAAGAATGATGTTGTCCAACACTACTGGGATGTTCTTGTACAAGCTTTTG
TCCAAAATGGCACAGTGAGCACAAATGAGTTCCTGTGTGATAAAGACAAAACTTC
AACAGTGGCACCCACCATACACACCACTGTGCCATCTCCTACTACAACACCTACTC
CAAAGGAAAAACCAGAAGCTGGAACCTATTCAGTTAATAATGGCAATGATACTTG
TCTGCTGGCTACCATGGGGCTGCAGCTGAACATCACTCAGGATAAGGTTGCTTCA
GTTATTAACATCAACCCCAATACAACTCACTCCACAGGCAGCTGCCGTTCTCACAC
TGCTCTACTTAGACTCAATAGCAGCACCATTAAGTATCTAGACTTTGTCTTTGCTG
TGAAAAATGAAAACCGATTTTATCTGAAGGAAGTGAACATCAGCATGTATTTGGT
TAATGGCTCCGTTTTCAGCATTGCAAATAACAATCTCAGCTACTGGGATGCCCCCC
TGGGAAGTTCTTATATGTGCAACAAAGAGCAGACTGTTTCAGTGTCTGGAGCATTT
CAGATAAATACCTTTGATCTAAGGGTTCAGCCTTTCAATGTGACACAAGGAAAGT
ATTCTACAGCCCAAGAGTGTTCGCTGGATGATGACACCATTCTAATCCCAATTATA
GTTGGTGCTGGTCTTTCAGGCTTGATTATCGTTATAGTGATTGCTAGCTCCCACTG
GTGTTGTAAGAAGGAGGTTCAGGAGACACGGCGCGAGCGCCGCAGGCTCATGTC
GATGGAGATGGAC; Construct coding sequence from vector 135 (for Lamp2 surface-and-
transmembrane domains-PTGERN cytosolic domain chimeric VLM); Artificial Sequence
116:
LELNLTDSENATCLYAKWQMNFTVRYETTNKTYKTVTISDHGTVTYNGSICGDDQN
GPKIAVQFGPGFSWIANFTKAASTYSIDSVSFSYNTGDNTTFPDAEDKGILTVDELLAIR
IPLNDLERCNSLSTLEKNDVVQHYWDVLVQAFVQNGTVSTNEFLCDKDKTSTVAPTI
HTTVPSPTTTPTPKEKPEAGTYSVNNGNDTCLLATMGLQLNITQDKVASVININPNTT
HSTGSCRSHTALLRLNSSTIKYLDFVFAVKNENRFYLKEVNISMYLVNGSVFSIANNN
LSYWDAPLGSSYMCNKEQTVSVSGAFQINTFDLRVQPFNVTQGKYSTAQECSLDDDT,
ILIPIIVGAGLSGLIIVIVIA, SSHWCCKKEVQETRRERRRLMSMEMD; Construct peptide
sequence from vector 135 (for Lamp2 surface-and-transmembrane domains-PTGFRN
cytosolic domain chimeric VLM); Artificial Sequence
117:
TTGGAACTTAATTTGACAGATTCAGAAAATGCCACTTGCCTTTATGCAAAATGGCA
GATGAATTTCACAGTACGCTATGAAACTACAAATAAAACTTATAAAACTGTAACC
ATTTCAGACCATGGCACTGTGACATATAATGGAAGCATTTGTGGGGATGATCAGA
ATGGTCCCAAAATAGCAGTGCAGTTCGGACCTGGCTTTTCCTGGATTGCGAATTTT
ACCAAGGCAGCATCTACTTATTCAATTGACAGCGTCTCATTTTCCTACAACACTGG
TGATAACACAACATTTCCTGATGCTGAAGATAAAGGAATTCTTACTGTTGATGAA
CTTTTGGCCATCAGAATTCCATTGAATGACCTTTTTAGATGCAATAGTTTATCAAC
TTTGGAAAAGAATGATGTTGTCCAACACTACTGGGATGTTCTTGTACAAGCTTTTG
TCCAAAATGGCACAGTGAGCACAAATGAGTTCCTGTGTGATAAAGACAAAACTTC
AACAGTGGCACCCACCATACACACCACTGTGCCATCTCCTACTACAACACCTACTC
CAAAGGAAAAACCAGAAGCTGGAACCTATTCAGTTAATAATGGCAATGATACTTG
TCTGCTGGCTACCATGGGGCTGCAGCTGAACATCACTCAGGATAAGGTTGCTTCA
GTTATTAACATCAACCCCAATACAACTCACTCCACAGGCAGCTGCCGTTCTCACAC
TGCTCTACTTAGACTCAATAGCAGCACCATTAAGTATCTAGACTTTGTCTTTGCTG
TGAAAAATGAAAACCGATTTTATCTGAAGGAAGTGAACATCAGCATGTATTTGGT
TAATGGCTCCGTTTTCAGCATTGCAAATAACAATCTCAGCTACTGGGATGCCCCCC
TGGGAAGTTCTTATATGTGCAACAAAGAGCAGACTGTTTCAGTGTCTGGAGCATTT
CAGATAAATACCTTTGATCTAAGGGTTCAGCCTTTCAATGTGACACAAGGAAAGT
ATTCTACAGCCCAAGAGTGTTCGCTGGATGATGACACCATTCTAATCCCAATTATA
GTTGGTGCTGGTCTTTCAGGCTTGATTATCGTTATAGTGATTGCTAAGTGCGGCTT
CTTCAAGCGAGCCCGCACTCGCGCCCTGTATGAAGCTAAGAGGCAGAAGGCGGA
GATGAAGAGCCAGCCGTCAGAGACAGAGAGGCTGACCGACGACTAC; Construct
coding sequence from vector 140 (for Lamp2 surface-and-transmembrane domains-ITGA3
cytosolic domain chimeric VLM); Artificial Sequence
118:
LELNLTDSENATCLYAKWQMNFTVRYETTNKTYKTVTISDHGTVTYNGSICGDDQN
GPKIAVQFGPGFSWIANFTKAASTYSIDSVSFSYNTGDNTTFPDAEDKGILTVDELLAIR
IPLNDLERCNSLSTLEKNDVVQHYWDVLVQAFVQNGTVSTNEFLCDKDKTSTVAPTI
HTTVPSPTTTPTPKEKPEAGTYSVNNGNDTCLLATMGLQLNITQDKVASVININPNTT
HSTGSCRSHTALLRLNSSTIKYLDFVFAVKNENRFYLKEVNISMYLVNGSVFSIANNN
LSYWDAPLGSSYMCNKEQTVSVSGAFQINTFDLRVQPFNVTQGKYSTAQECSLDDDT,
ILIPIIVGAGLSGLIIVIVIA, KCGFFKRARTRALYEAKRQKAEMKSQPSETERLTDDY;
Construct peptide sequence from vector 140 (for Lamp2 surface-and-transmembrane
domains-ITGA3 cytosolic domain chimeric VLM); Artificial Sequence
119:
TTGGAACTTAATTTGACAGATTCAGAAAATGCCACTTGCCTTTATGCAAAATGGCA
GATGAATTTCACAGTACGCTATGAAACTACAAATAAAACTTATAAAACTGTAACC
ATTTCAGACCATGGCACTGTGACATATAATGGAAGCATTTGTGGGGATGATCAGA
ATGGTCCCAAAATAGCAGTGCAGTTCGGACCTGGCTTTTCCTGGATTGCGAATTTT
ACCAAGGCAGCATCTACTTATTCAATTGACAGCGTCTCATTTTCCTACAACACTGG
TGATAACACAACATTTCCTGATGCTGAAGATAAAGGAATTCTTACTGTTGATGAA
CTTTTGGCCATCAGAATTCCATTGAATGACCTTTTTAGATGCAATAGTTTATCAAC
TTTGGAAAAGAATGATGTTGTCCAACACTACTGGGATGTTCTTGTACAAGCTTTTG
TCCAAAATGGCACAGTGAGCACAAATGAGTTCCTGTGTGATAAAGACAAAACTTC
AACAGTGGCACCCACCATACACACCACTGTGCCATCTCCTACTACAACACCTACTC
CAAAGGAAAAACCAGAAGCTGGAACCTATTCAGTTAATAATGGCAATGATACTTG
TCTGCTGGCTACCATGGGGCTGCAGCTGAACATCACTCAGGATAAGGTTGCTTCA
GTTATTAACATCAACCCCAATACAACTCACTCCACAGGCAGCTGCCGTTCTCACAC
TGCTCTACTTAGACTCAATAGCAGCACCATTAAGTATCTAGACTTTGTCTTTGCTG
TGAAAAATGAAAACCGATTTTATCTGAAGGAAGTGAACATCAGCATGTATTTGGT
TAATGGCTCCGTTTTCAGCATTGCAAATAACAATCTCAGCTACTGGGATGCCCCCC
TGGGAAGTTCTTATATGTGCAACAAAGAGCAGACTGTTTCAGTGTCTGGAGCATTT
CAGATAAATACCTTTGATCTAAGGGTTCAGCCTTTCAATGTGACACAAGGAAAGT
ATTCTACAGCCCAAGAGTGTTCGCTGGATGATGACACCATTCTAATCCCAATTATA
GTTGGTGCTGGTCTTTCAGGCTTGATTATCGTTATAGTGATTGCTGTGATGCAGAG
ACTCTTTCCCCGCATCCCTCACATGAAAGACCCCATCGGTGACAGCTTCCAAAACG
ACAAGCTGGTGGTCTGGGAGGCGGGCAAAGCCGGCCTGGAGGAGTGTCTGGTGA
CTGAAGTACAGGTCGTGCAGAAAACT; Construct coding sequence from vector 141 (for
Lamp2 surface-and-transmembrane domains-IL3RA cytosolic domain chimeric VLM);
Artificial Sequence
120:
LELNLTDSENATCLYAKWQMNFTVRYETTNKTYKTVTISDHGTVTYNGSICGDDQN
GPKIAVQFGPGFSWIANFTKAASTYSIDSVSFSYNTGDNTTFPDAEDKGILTVDELLAIR
IPLNDLFRCNSLSTLEKNDVVQHYWDVLVQAFVQNGTVSTNEFLCDKDKTSTVAPTI
HTTVPSPTTTPTPKEKPEAGTYSVNNGNDTCLLATMGLQLNITQDKVASVININPNTT
HSTGSCRSHTALLRLNSSTIKYLDFVFAVKNENRFYLKEVNISMYLVNGSVFSIANNN
LSYWDAPLGSSYMCNKEQTVSVSGAFQINTFDLRVQPFNVTQGKYSTAQECSLDDDT,
ILIPIIVGAGLSGLIIVIVIA,
VMQRLFPRIPHMKDPIGDSFQNDKLVVWEAGKAGLEECLVTEVQVVQKT; Construct
peptide sequence from vector 141 (for Lamp2 surface-and-transmembrane domains-IL3RA
cytosolic domain chimeric VLM); Artificial Sequence
121:
TTGGAACTTAATTTGACAGATTCAGAAAATGCCACTTGCCTTTATGCAAAATGGCA
GATGAATTTCACAGTACGCTATGAAACTACAAATAAAACTTATAAAACTGTAACC
ATTTCAGACCATGGCACTGTGACATATAATGGAAGCATTTGTGGGGATGATCAGA
ATGGTCCCAAAATAGCAGTGCAGTTCGGACCTGGCTTTTCCTGGATTGCGAATTTT
ACCAAGGCAGCATCTACTTATTCAATTGACAGCGTCTCATTTTCCTACAACACTGG
TGATAACACAACATTTCCTGATGCTGAAGATAAAGGAATTCTTACTGTTGATGAA
CTTTTGGCCATCAGAATTCCATTGAATGACCTTTTTAGATGCAATAGTTTATCAAC
TTTGGAAAAGAATGATGTTGTCCAACACTACTGGGATGTTCTTGTACAAGCTTTTG
TCCAAAATGGCACAGTGAGCACAAATGAGTTCCTGTGTGATAAAGACAAAACTTC
AACAGTGGCACCCACCATACACACCACTGTGCCATCTCCTACTACAACACCTACTC
CAAAGGAAAAACCAGAAGCTGGAACCTATTCAGTTAATAATGGCAATGATACTTG
TCTGCTGGCTACCATGGGGCTGCAGCTGAACATCACTCAGGATAAGGTTGCTTCA
GTTATTAACATCAACCCCAATACAACTCACTCCACAGGCAGCTGCCGTTCTCACAC
TGCTCTACTTAGACTCAATAGCAGCACCATTAAGTATCTAGACTTTGTCTTTGCTG
TGAAAAATGAAAACCGATTTTATCTGAAGGAAGTGAACATCAGCATGTATTTGGT
TAATGGCTCCGTTTTCAGCATTGCAAATAACAATCTCAGCTACTGGGATGCCCCCC
TGGGAAGTTCTTATATGTGCAACAAAGAGCAGACTGTTTCAGTGTCTGGAGCATTT
CAGATAAATACCTTTGATCTAAGGGTTCAGCCTTTCAATGTGACACAAGGAAAGT
ATTCTACAGCCCAAGAGTGTTCGCTGGATGATGACACCATTCTAATCCCAATTATA
GTTGGTGCTGGTCTTTCAGGCTTGATTATCGTTATAGTGATTGCTCGCCTCTCCCGC
AAGGGCCACATGTACCCCGTGCGTAATTACTCCCCCACCGAGATGGTCTGCATCTC
ATCCCTGTTGCCTGATGGGGGTGAGGGGCCCTCTGCCACAGCCAATGGGGGCCTG
TCCAAGGCCAAGAGCCCGGGCCTGACGCCAGAGCCCAGGGAGGACCGTGAGGGG
GATGACCTCACCCTGCACAGCTTCCTCCCT; Construct coding sequence from vector
142 (for Lamp2 surface-and-transmembrane domains-SELPLG cytosolic domain chimeric
VLM); Artificial Sequence
122:
LELNLTDSENATCLYAKWQMNFTVRYETTNKTYKTVTISDHGTVTYNGSICGDDQN
GPKIAVQFGPGFSWIANFTKAASTYSIDSVSFSYNTGDNTTFPDAEDKGILTVDELLAIR
IPLNDLFRCNSLSTLEKNDVVQHYWDVLVQAFVQNGTVSTNEFLCDKDKTSTVAPTI
HTTVPSPTTTPTPKEKPEAGTYSVNNGNDTCLLATMGLQLNITQDKVASVININPNTT
HSTGSCRSHTALLRLNSSTIKYLDFVFAVKNENRFYLKEVNISMYLVNGSVFSIANNN
LSYWDAPLGSSYMCNKEQTVSVSGAFQINTFDLRVQPFNVTQGKYSTAQECSLDDDT,
ILIPIIVGAGLSGLIIVIVIA,
RLSRKGHMYPVRNYSPTEMVCISSLLPDGGEGPSATANGGLSKAKSPGLTPEPREDRE
GDDLTLHSFLP; Construct peptide sequence from vector 142 (for Lamp2 surface-and-
transmembrane domains-SELPLG cytosolic domain chimeric VLM); Artificial Sequence
123:
TTGGAACTTAATTTGACAGATTCAGAAAATGCCACTTGCCTTTATGCAAAATGGCA
GATGAATTTCACAGTACGCTATGAAACTACAAATAAAACTTATAAAACTGTAACC
ATTTCAGACCATGGCACTGTGACATATAATGGAAGCATTTGTGGGGATGATCAGA
ATGGTCCCAAAATAGCAGTGCAGTTCGGACCTGGCTTTTCCTGGATTGCGAATTTT
ACCAAGGCAGCATCTACTTATTCAATTGACAGCGTCTCATTTTCCTACAACACTGG
TGATAACACAACATTTCCTGATGCTGAAGATAAAGGAATTCTTACTGTTGATGAA
CTTTTGGCCATCAGAATTCCATTGAATGACCTTTTTAGATGCAATAGTTTATCAAC
TTTGGAAAAGAATGATGTTGTCCAACACTACTGGGATGTTCTTGTACAAGCTTTTG
TCCAAAATGGCACAGTGAGCACAAATGAGTTCCTGTGTGATAAAGACAAAACTTC
AACAGTGGCACCCACCATACACACCACTGTGCCATCTCCTACTACAACACCTACTC
CAAAGGAAAAACCAGAAGCTGGAACCTATTCAGTTAATAATGGCAATGATACTTG
TCTGCTGGCTACCATGGGGCTGCAGCTGAACATCACTCAGGATAAGGTTGCTTCA
GTTATTAACATCAACCCCAATACAACTCACTCCACAGGCAGCTGCCGTTCTCACAC
TGCTCTACTTAGACTCAATAGCAGCACCATTAAGTATCTAGACTTTGTCTTTGCTG
TGAAAAATGAAAACCGATTTTATCTGAAGGAAGTGAACATCAGCATGTATTTGGT
TAATGGCTCCGTTTTCAGCATTCCAAATAACAATCTCAGCTACTGGGATGCCCCCC
TGGGAAGTTCTTATATGTGCAACAAAGAGCAGACTGTTTCAGTGTCTGGAGCATTT
CAGATAAATACCTTTGATCTAAGGGTTCAGCCTTTCAATGTGACACAAGGAAAGT
ATTCTACAGCCCAAGAGTGTTCGCTGGATGATGACACCATTCTAATCCCAATTATA
GTTGGTGCTGGTCTTTCAGGCTTGATTATCGTTATAGTGATTGCTCTTTTAATGATA
ATTCATGACAGAAGGGAGTTTGCTAAATTTGAAAAGGAGAAAATGAATGCCAAAT
GGGACACGGGTGAAAATCCTATTTATAAGAGTGCCGTAACAACTGTGGTCAATCC
GAAGTATGAGGGAAAA; Construct coding sequence from vector 143 (for Lamp2 surface-
and-transmembrane domains-ITGB1 cytosolic domain chimeric VLM); Artificial Sequence
124:
LELNLTDSENATCLYAKWQMNFTVRYETTNKTYKTVTISDHGTVTYNGSICGDDQN
GPKIAVQFGPGFSWIANFTKAASTYSIDSVSFSYNTGDNTTFPDAEDKGILTVDELLAIR
IPLNDLFRCNSLSTLEKNDVVQHYWDVLVQAFVQNGTVSTNEFLCDKDKTSTVAPTI
HTTVPSPTTTPTPKEKPEAGTYSVNNGNDTCLLATMGLQLNITQDKVASVININPNTT
HSTGSCRSHTALLRLNSSTIKYLDFVFAVKNENRFYLKEVNISMYLVNGSVFSIANNN
LSYWDAPLGSSYMCNKEQTVSVSGAFQINTFDLRVQPFNVTQGKYSTAQECSLDDDT,
ILIPIIVGAGLSGLIIVIVIA,
LLMIIHDRREFAKFEKEKMNAKWDTGENPIYKSAVTTVVNPKYEGK; Construct
peptide sequence from vector 143 (for Lamp2 surface-and-transmembrane domains-ITGB]
cytosolic domain chimeric VLM); Artificial Sequence
125:
TTGGAACTTAATTTGACAGATTCAGAAAATGCCACTTGCCTTTATGCAAAATGGCA
GATGAATTTCACAGTACGCTATGAAACTACAAATAAAACTTATAAAACTGTAACC
ATTTCAGACCATGGCACTGTGACATATAATGGAAGCATTTGTGGGGATGATCAGA
ATGGTCCCAAAATAGCAGTGCAGTTCGGACCTGGCTTTTCCTGGATTGCGAATTTT
ACCAAGGCAGCATCTACTTATTCAATTGACAGCGTCTCATTTTCCTACAACACTGG
TGATAACACAACATTTCCTGATGCTGAAGATAAAGGAATTCTTACTGTTGATGAA
CTTTTGGCCATCAGAATTCCATTGAATGACCTTTTTAGATGCAATAGTTTATCAAC
TTTGGAAAAGAATGATGTTGTCCAACACTACTGGGATGTTCTTGTACAAGCTTTTG
TCCAAAATGGCACAGTGAGCACAAATGAGTTCCTGTGTGATAAAGACAAAACTTC
AACAGTGGCACCCACCATACACACCACTGTGCCATCTCCTACTACAACACCTACTC
CAAAGGAAAAACCAGAAGCTGGAACCTATTCAGTTAATAATGGCAATGATACTTG
TCTGCTGGCTACCATGGGGCTGCAGCTGAACATCACTCAGGATAAGGTTGCTTCA
GTTATTAACATCAACCCCAATACAACTCACTCCACAGGCAGCTGCCGTTCTCACAC
TGCTCTACTTAGACTCAATAGCAGCACCATTAAGTATCTAGACTTTGTCTTTGCTG
TGAAAAATGAAAACCGATTTTATCTGAAGGAAGTGAACATCAGCATGTATTTGGT
TAATGGCTCCGTTTTCAGCATTGCAAATAACAATCTCAGCTACTGGGATGCCCCCC
TGGGAAGTTCTTATATGTGCAACAAAGAGCAGACTGTTTCAGTGTCTGGAGCATTT
CAGATAAATACCTTTGATCTAAGGGTTCAGCCTTTCAATGTGACACAAGGAAAGT
ATTCTACAGCCCAAGAGTGTTCGCTGGATGATGACACCATTCTAATCCCAATTATA
GTTGGTGCTGGTCTTTCAGGCTTGATTATCGTTATAGTGATTGCTCGGATCCGGGC
CGCACATCGGCGGACCATGCGGGATCAGGACACCGGGAAGGAGAACGAGATGGA
CTGGGACGACTCTGCCCTGACCATCACCGTCAACCCCATGGAGACCTATGAGGAC
CAGCACAGCAGTGAGGAGGAGGAGGAAGAGGAAGAGGAAGAGGAAAGCGAGGA
CGGCGAAGAAGAGGATGACATCACCAGCGCCGAGTCGGAGAGCAGCGAGGAGGA
GGAGGGGGAGCAGGGCGACCCCCAGAACGCAACCCGGCAGCAGCAGCTGGAGTG
GGATGACTCCACCCTCAGCTAC; Construct coding sequence from vector 144 (for Lamp2
surface-and-transmembrane domains-CLSTN1 cytosolic domain chimeric VLM); Artificial
Sequence
126:
LELNLTDSENATCLYAKWQMNFTVRYETTNKTYKTVTISDHGTVTYNGSICGDDQN
GPKIAVQFGPGFSWIANFTKAASTYSIDSVSFSYNTGDNTTFPDAEDKGILTVDELLAIR
IPLNDLERCNSLSTLEKNDVVQHYWDVLVQAFVQNGTVSTNEFLCDKDKTSTVAPTI
HTTVPSPTTTPTPKEKPEAGTYSVNNGNDTCLLATMGLQLNITQDKVASVININPNTT
HSTGSCRSHTALLRLNSSTIKYLDFVFAVKNENRFYLKEVNISMYLYNGSVESIANNN
LSYWDAPLGSSYMCNKEQTVSVSGAFQINTFDLRVQPFNVTQGKYSTAQECSLDDDT,
ILIPIIVGAGLSGLIIVIVIA,
RIRAAHRRTMRDQDTGKENEMDWDDSALTITVNPMETYEDQHSSEEEEEEEEEEESE
DGEEEDDITSAESESSEEEEGEQGDPQNATRQQQLEWDDSTLSY; Construct peptide
sequence from vector 144 (for Lamp2 surface-and-transmembrane domains-CLSTNI
cytosolic domain chimeric VLM); Artificial Sequence
127:
CGGGAGGTGCTGGTCCCCGAGGGGCCCTTGTACCGCGTGGCTGGCACAGCTGTCT
CCATCTCCTGCAATGTGACCGGCTATGAGGGCCCTGCCCAGCAGAACTTCGAGTG
GTTCCTGTATAGGCCCGAGGCCCCAGATACTGCACTGGGCATTGTCAGTACCAAG
GATACCCAGTTCTCCTATGCTGTCTTCAAGTCCCGAGTGGTGGCGGGTGAGGTGCA
GGTGCAGCGCCTACAAGGTGATGCCGTGGTGCTCAAGATTGCCCGCCTGCAGGCC
CAGGATGCCGGCATTTATGAGTGCCACACCCCCTCCACTGATACCCGCTACCTGG
GCAGCTACAGCGGCAAGGTGGAGCTGAGAGTTCTTCCAGATGTCCTCCAGGTGTC
TGCTGCCCCCCCAGGGCCCCGAGGCCGCCAGGCCCCAACCTCACCCCCACGCATG
ACGGTGCATGAGGGGCAGGAGCTGGCACTGGGCTGCCTGGCGAGGACAAGCACA
CAGAAGCACACACACCTGGCAGTGTCCTTTGGGCGATCTGTGCCCGAGGCACCAG
TTGGGCGGTCAACTCTGCAGGAAGTGGTGGGAATCCGGTCAGACTTGGCCGTGGA
GGCTGGAGCTCCCTATGCTGAGCGATTGGCTGCAGGGGAGCTTCGTCTGGGCAAG
GAAGGGACCGATCGGTACCGCATGGTAGTAGGGGGTGCCCAGGCAGGGGACGCA
GGCACCTACCACTGCACTGCCGCTGAGTGGATTCAGGATCCTGATGGCAGCTGGG
CCCAGATTGCAGAGAAAAGGGCCGTCCTGGCCCACGTGGATGTGCAGACGCTGTC
CAGCCAGCTGGCAGTGACAGTGGGGCCTGGTGAACGTCGGATCGGCCCAGGGGA
GCCCTTGGAACTGCTGTGCAATGTGTCAGGGGCACTTCCCCCAGCAGGCCGTCAT
GCTGCATACTCTGTAGGTTGGGAGATGGCACCTGCGGGGGCACCTGGGCCCGGCC
GCCTGGTAGCCCAGCTGGACACAGAGGGTGTGGGCAGCCTGGGCCCTGGCTATGA
GGGCCGACACATTGCCATGGAGAAGGTGGCATCCAGAACATACCGGCTACGGCTA
GAGGCTGCCAGGCCTGGTGATGCGGGCACCTACCGCTGCCTCGCCAAAGCCTATG
TTCGAGGGTCTGGGACCCGGCTTCGTGAAGCAGCCAGTGCCCGTTCCCGGCCTCTC
CCTGTACATGTGCGGGAGGAAGGTGTGGTGCTGGAGGCTGTGGCATGGCTAGCAG
GAGGCACAGTGTACCGCGGGGAGACTGCCTCCCTGCTGTGCAACATCTCTGTGCG
GGGTGGCCCCCCAGGACTGCGGCTGGCCGCCAGCTGGTGGGTGGAGCGACCAGA
GGACGGAGAGCTCAGCTCTGTCCCTGCCCAGCTGGTGGGTGGCGTAGGCCAGGAT
GGTGTGGCAGAGCTGGGAGTCCGGCCTGGAGGAGGCCCTGTCAGCGTAGAGCTG
GTGGGGCCCCGAAGCCATCGGCTGAGACTACACAGCTTGGGGCCCGAGGATGAA
GGCGTGTACCACTGTGCCCCCAGCGCCTGGGTGCAGCATGCCGACTACAGCTGGT
ACCAGGCGGGCAGTGCCCGCTCAGGGCCTGTTACAGTCTACCCCTACATGCATGC
CCTGGACACCCTATTTGTGCCTCTGCTGGTGGGTACAGGGGTGGCCCTAGTCACTG
GTGCCACTGTCCTTGGTACCATCACTTGCTGCTTCATGAAGAGGCTTCGAAAACGG;
Construct coding sequence from vector 157 (for IGSF8 VLM); Artificial Sequence
128:
REVLVPEGPLYRVAGTAVSISCNVTGYEGPAQQNFEWFLYRPEAPDTALGIVSTKDTQ
FSYAVFKSRVVAGEVQVQRLQGDAVVLKIARLQAQDAGIYECHTPSTDTRYLGSYSG
KVELRVLPDVLQVSAAPPGPRGRQAPTSPPRMTVHEGQELALGCLARTSTQKHTHLA
VSFGRSVPEAPVGRSTLQEVVGIRSDLAVEAGAPYAERLAAGELRLGKEGTDRYRMV
VGGAQAGDAGTYHCTAAEWIQDPDGSWAQIAEKRAVLAHVDVQTLSSQLAVTVGP
GERRIGPGEPLELLCNVSGALPPAGRHAAYSVGWEMAPAGAPGPGRLVAQLDTEGV
GSLGPGYEGRHIAMEKVASRTYRLRLEAARPGDAGTYRCLAKAYVRGSGTRLREAA
SARSRPLPVHVREEGVVLEAVAWLAGGTVYRGETASLLCNISVRGGPPGLRLAASW
WVERPEDGELSSVPAQLVGGVGQDGVAELGVRPGGGPVSVELVGPRSHRLRLHSLGP
EDEGVYHCAPSAWVQHADYSWYQAGSARSGPVTVYPYMHALDTLFVPLLVGTGVA
LVTGATVLGTITCCFMKRLRKR; Construct peptide sequence from vector 157 (for IGSF8
VLM); Artificial Sequence

TABLE 5
VLM Domains

SEQ ID NO: Sequence; Source
129:
CTGGAGCTGAACCTGACCGACAGCGAGAACGCCACCTGCCTGTACGCCAAGTGGC
AGATGAACTTCACCGTGAGATACGAGACCACCAACAAGACCTACAAGACCGTGA
CCATCAGCGACCACGGCACCGTGACCTACAACGGCAGCATCTGCGGCGACGACCA
GAACGGCCCCAAGATCGCCGTGCAGTTCGGCCCCGGCTTCAGCTGGATCGCCAAC
TTCACCAAGGCCGCCAGCACCTACAGCATCGACAGCGTGAGCTTCAGCTACAACA
CCGGCGACAACACCACCTTCCCCGACGCCGAGGACAAGGGCATCCTGACCGTGGA
CGAGCTGCTGGCCATCAGAATCCCCCTGAACGACCTGTTCAGATGCAACAGCCTG
AGCACCCTGGAGAAGAACGACGTGGTGCAGCACTACTGGGACGTGCTGGTGCAG
GCCTTCGTGCAGAACGGCACCGTGAGCACCAACGAGTTCCTGTGCGACAAGGACA
AGACCAGCACCGTGGCCCCCACCATCCACACCACCGTGCCCAGCCCCACCACCAC
CCCCACCCCCAAGGAGAAGCCCGAGGCCGGCACCTACAGCGTGAACAACGGCAA
CGACACCTGCCTGCTGGCCACCATGGGCCTGCAGCTGAACATCACCCAGGACAAG
GTGGCCAGCGTGATCAACATCAACCCCAACACCACCCACAGCACCGGCAGCTGCA
GAAGCCACACCGCCCTGCTGAGACTGAACAGCAGCACCATCAAGTACCTGGACTT
CGTGTTCGCCGTGAAGAACGAGAACAGATTCTACCTGAAGGAGGTGAACATCAGC
ATGTACCTGGTGAACGGCAGCGTGTTCAGCATCGCCAACAACAACCTGAGCTACT
GGGACGCCCCCCTGGGCAGCAGCTACATGTGCAACAAGGAGCAGACCGTGAGCG
TGAGCGGCGCCTTCCAGATCAACACCTTCGACCTGAGAGTGCAGCCCTTCAACGT
GACCCAGGGCAAGTACAGCACCGCCCAGGAGTGCAGCCTGGACGACGACACC;
Coding sequence of surface domain for fusion proteins produced from LAMP2; Artificial
Sequence
130:
LELNLTDSENATCLYAKWQMNFTVRYETTNKTYKTVTISDHGTVTYNGSICGDDQN
GPKIAVQFGPGFSWIANFTKAASTYSIDSVSFSYNTGDNTTFPDAEDKGILTVDELLAIR
IPLNDLFRCNSLSTLEKNDVVQHYWDVLVQAFVQNGTVSTNEFLCDKDKTSTVAPTI
HTTVPSPTTTPTPKEKPEAGTYSVNNGNDTCLLATMGLQLNITQDKVASVININPNTT
HSTGSCRSHTALLRLNSSTIKYLDFVFAVKNENRFYLKEVNISMYLVNGSVFSIANNN
LSYWDAPLGSSYMCNKEQTVSVSGAFQINTFDLRVQPFNVTQGKYSTAQECSLDDDT;
Peptide sequence of surface domain for fusion proteins produced from LAMP2; Artificial
Sequence
131:
ATCCTGATCCCCATCATCGTGGGCGCCGGCCTGAGCGGCCTGATCATCGTGATCGT
GATCCCC; Coding sequence of transmembrane domain for fusion proteins produced from
LAMP2; Artificial Sequence
132: ILIPIIVGAGLSGLIIVIVIA; Peptide sequence of transmembrane domain for fusion
proteins produced from LAMP2; Artificial Sequence
133: TACGTGATCGGCAGAAGAAAGAGCTACGCCGGCTACCAGACCCTG; Coding
sequence of cytosolic domain for fusion proteins produced from LAMP2; Artificial
Sequence
134: YVIGRRKSYAGYQTL; Peptide sequence of cytosolic domain for fusion proteins
produced from LAMP2; Artificial Sequence
135:
GCCAGAGTGAACAAGCACAAGCCCTGGCTGGAGCCCACCTACCACGGCATCGTGA
CCGAGAACGACAACACCGTGCTGCTGGACCCCCCCCTGATCGCCCTGGACAAGGA
CGCCCCCCTGAGATTCGCCGAGAGCTTCGAGGTGACCGTGACCAAGGAGGGCGAG
ATCTGCGGCTTCAAGATCCACGGCCAGAACGTGCCCTTCGACGCCGTGGTGGTGG
ACAAGAGCACCGGCGAGGGCGTGATCAGAAGCAAGGAGAAGCTGGACTGCGAGC
TGCAGAAGGACTACAGCTTCACCATCCAGGCCTACGACTGCGGCAAGGGCCCCGA
CGGCACCAACGTGAAGAAGAGCCACAAGGCCACCGTGCACATCCAGGTGAACGA
CGTGAACGAGTACGCCCCCGTGTTCAAGGAGAAGAGCTACAAGGCCACCGTGATC
GAGGGCAAGCAGTACGACAGCATCCTGAGAGTGGAGGCCGTGGACGCCGACTGC
AGCCCCCAGTTCAGCCAGATCTGCAGCTACGAGATCATCACCCCCGACGTGCCCT
TCACCGTGGACAAGGACGGCTACATCAAGAACACCGAGAAGCTGAACTACGGCA
AGGAGCACCAGTACAAGCTGACCGTGACCGCCTACGACTGCGGCAAGAAGAGAG
CCACCGAGGACGTGCTGGTGAAGATCAGCATCAAGCCCACCTGCACCCCCGGCTG
GCAGGGCTGGAACAACAGAATCGAGTACGAGCCCGGCACCGGCGCCCTGGCCGT
GTTCCCCAACATCCACCTGGAGACCTGCGACGAGCCCGTGGCCAGCGTGCAGGCC
ACCGTGGAGCTGGAGACCAGCCACATCGGCAAGGGCTGCGACAGAGACACCTAC
AGCGAGAAGAGCCTGCACAGACTGTGCGGCGCCGCCGCCGGCACCGCCGAGCTG
CTGCCCAGCCCCAGCGGCAGCCTGAACTGGACCATGGGCCTGCCCACCGACAACG
GCCACGACAGCGACCAGGTGTTCGAGTTCAACGGCACCCAGGCCGTGAGAATCCC
CGACGGCGTGGTGAGCGTGAGCCCCAAGGAGCCCTTCACCATCAGCGTGTGGATG
AGACACGGCCCCTTCGGCAGAAAGAAGGAGACCATCCTGTGCAGCAGCGACAAG
ACCGACATGAACAGACACCACTACAGCCTGTACGTGCACGGCTGCAGACTGATCT
TCCTGTTCAGACAGGACCCCAGCGAGGAGAAGAAGTACAGACCCGCCGAGTTCCA
CTGGAAGCTGAACCAGGTGTGCGACGAGGAGTGGCACCACTACGTGCTGAACGTG
GAGTTCCCCAGCGTGACCCTGTACGTGGACGGCACCAGCCACGAGCCCTTCAGCG
TGACCGAGGACTACCCCCTGCACCCCAGCAAGATCGAGACCCAGCTGGTGGTGGG
CGCCTGCTGGCAGGAGTTCAGCGGCGTGGAGAACGACAACGAGACCGAGCCCGT
GACCGTGGCCAGCGCCGGCGGCGACCTGCACATGACCCAGTTCTTCAGAGGCAAC
CTGGCCGGCCTGACCCTGAGAAGCGGCAAGCTGGCCGACAAGAAGGTGATCGAC
TGCCTGTACACCTGCAAGGAGGGCCTGGACCTGCAGGTGCTGGAGGACAGCGGCA
GAGGCGTGCAGATCCAGGCCCACCCCAGCCAGCTGGTGCTGACCCTGGAGGGCGA
GGACCTGGGCGAGCTGGACAAGGCCATGCAGCACATCAGCTACCTGAACAGCAG
ACAGTTCCCCACCCCCGGCATCAGAAGACTGAAGATCACCAGCACCATCAAGTGC
TTCAACGAGGCCACCTGCATCAGCGTGCCCCCCGTGGACGGCTACGTGATGGTGC
TGCAGCCCGAGGAGCCCAAGATCAGCCTGAGCGGCGTGCACCACTTCGCCAGAGC
CGCCAGCGAGTTCGAGAGCAGCGAGGGCGTGTTCCTGTTCCCCGAGCTGAGAATC
ATCAGCACCATCACCAGAGAGGTGGAGCCCGAGGGCGACGGCGCCGAGGACCCC
ACCGTGCAGGAGAGCCTGGTGAGCGAGGAGATCGTGCACGACCTGGACACCTGC
GAGGTGACCGTGGAGGGCGAGGAGCTGAACCACGAGCAGGAGAGCCTGGAGGTG
GACATGGCCAGACTGCAGCAGAAGGGCATCGAGGTGAGCAGCAGCGAGCTGGGC
ATGACCTTCACCGGCGTGGACACCATGGCCAGCTACGAGGAGGTGCTGCACCTGC
TGAGATACAGAAACTGGCACGCCAGAAGCCTGCTGGACAGAAAGTTCAAGCTGA
TCTGCAGCGAGCTGAACGGCAGATACATCAGCAACGAGTTCAAGGTGGAGGTGA
ACGTGATCCACACCGCCAACCCCATGGAGCACGCCGCCGCCGCCGCCGCCCAGCC
CCAGTTCGTGCACCCCGAGCACAGAAGCTTCGTGGACCTGAGCGGCCACAACCTG
GCCAACCCCCACCCCTTCGCCGTGGTGCCCAGCACC; Coding sequence of surface
domain for fusion proteins produced from CSTN1; Artificial Sequence
136:
ARVNKHKPWLEPTYHGIVTENDNTVLLDPPLIALDKDAPLRFAESFEVTVTKEGEICG
FKIHGQNVPFDAVVVDKSTGEGVIRSKEKLDCELQKDYSFTIQAYDCGKGPDGTNVK
KSHKATVHIQVNDVNEYAPVFKEKSYKATVIEGKQYDSILRVEAVDADCSPQFSQICS
YEIITPDVPFTVDKDGYIKNTEKLNYGKEHQYKLTVTAYDCGKKRATEDVLVKISIKP
TCTPGWQGWNNRIEYEPGTGALAVFPNIHLETCDEPVASVQATVELETSHIGKGCDR
DTYSEKSLHRLCGAAAGTAELLPSPSGSLNWTMGLPTDNGHDSDQVFEFNGTQAVRI
PDGVVSVSPKEPFTISVWMRHGPFGRKKETILCSSDKTDMNRHHYSLYVHGCRLIFLF
RQDPSEEKKYRPAEFHWKLNQVCDEEWHHYVLNVEFPSVTLYVDGTSHEPFSVTED
YPLHPSKIETQLVVGACWQEFSGVENDNETEPVTVASAGGDLHMTQFFRGNLAGLTL
RSGKLADKKVIDCLYTCKEGLDLQVLEDSGRGVQIQAHPSQLVLTLEGEDLGELDKA
MQHISYLNSRQFPTPGIRRLKITSTIKCFNEATCISVPPVDGYVMVLQPEEPKISLSGVH
HFARAASEFESSEGVFLFPELRIISTITREVEPEGDGAEDPTVQESLVSEEIVHDLDTCEV
TVEGEELNHEQESLEVDMARLQQKGIEVSSSELGMTFTGVDTMASYEEVLHLLRYRN
WHARSLLDRKFKLICSELNGRYISNEFKVEVNVIHTANPMEHAAAAAAQPQFVHPEH
RSFVDLSGHNLANPHPFAVVPST; Peptide sequence of surface domain for fusion proteins
produced from CSTN1; Artificial Sequence
137:
GCCACCGTGGTGATCGTGGTGTGCGTGAGCTTCCTGGTGTTCATGATCATCCTGGG
CGTGTTC; Coding sequence of transmembrane domain for fusion proteins produced from
CSTN1; Artificial Sequence
138: ATVVIVVCVSFLVFMIILGVF; Peptide sequence of transmembrane domain for fusion
proteins produced from CSTN1; Artificial Sequence
139:
AGAATCAGAGCCGCCCACAGAAGAACCATGAGAGACCAGGACACCGGCAAGGAG
AACGAGATGGACTGGGACGACAGCGCCCTGACCATCACCGTGAACCCCATGGAG
ACCTACGAGGACCAGCACAGCAGCGAGGAGGAGGAGGAGGAGGAGGAGGAGGA
GGAGAGCGAGGACGGCGAGGAGGAGGACGACATCACCAGCGCCGAGAGCGAGA
GCAGCGAGGAGGAGGAGGGCGAGCAGGGCGACCCCCAGAACGCCACCAGACAG
CAGCAGCTGGAGTGGGACGACAGCACCCTGAGCTAC; Coding sequence of cytosolie
domain for fusion proteins produced from CSTN1; Artificial Sequence
140:
RIRAAHRRTMRDQDTGKENEMDWDDSALTITVNPMETYEDQHSSEEEEEEEEEEESE
DGEEEDDITSAESESSEEEEGEQGDPQNATRQQQLEWDDSTLSY; Peptide sequence of
cytosolic domain for fusion proteins produced from CSTN1; Artificial Sequence
141
AGCAGCCACTGGTGCTGCAAGAAGGAGGTGCAGGAGACCAGAAGAGAGAGAAG
AAGACTGATGAGCATGGAGATGGAC; Coding sequence of cytosolic domain for fusion
proteins produced from PTGRN; Artificial Sequence
142: SSHWCCKKEVQETRRERRRLMSMEMD; Peptide sequence of cytosolic domain for
fusion proteins produced from PTGRN; Artificial Sequence
143:
AAGTGCGGCTTCTTCAAGAGAGCCAGAACCAGAGCCCTGTACGAGGCCAAGAGA
CAGAAGGCCGAGATGAAGAGCCAGCCCAGCGAGACCGAGAGACTGACCGACGAC
TAC; Coding sequence of cytosolic domain for fusion proteins produced from ITGA3;
Artificial Sequence
144: KCGFFKRARTRALYEAKRQKAEMKSQPSETERLTDDY; Peptide sequence of
cytosolic domain for fusion proteins produced from ITGA3; Artificial Sequence
145:
GTGATGCAGAGACTGTTCCCCAGAATCCCCCACATGAAGGACCCCATCGGCGACA
GCTTCCAGAACGACAAGCTGGTGGTGTGGGAGGCCGGCAAGGCCGGCCTGGAGG
AGTGCCTGGTGACCGAGGTGCAGGTGGTGCAGAAGACC; Coding sequence of
cytosolic domain for fusion proteins produced from IL3RA; Artificial Sequence
146: VMQRLFPRIPHMKDPIGDSFQNDKLVVWEAGKAGLEECLVTEVQVVQKT;
Peptide sequence of cytosolic domain for fusion proteins produced from IL3RA; Artificial
Sequence
147:
AGACTGAGCAGAAAGGGCCACATGTACCCCGTGAGAAACTACAGCCCCACCGAG
ATGGTGTGCATCAGCAGCCTGCTGCCCGACGGCGGCGAGGGCCCCAGCGCCACCG
CCAACGGCGGCCTGAGCAAGGCCAAGAGCCCCGGCCTGACCCCCGAGCCCAGAG
AGGACAGAGAGGGCGACGACCTGACCCTGCACAGCTTCCTGCCC; Coding sequence
of cytosolic domain for fusion proteins produced from SELPL; Artificial Sequence
148:
RLSRKGHMYPVRNYSPTEMVCISSLLPDGGEGPSATANGGLSKAKSPGLTPEPREDRE
GDDLTLHSFLP; Peptide sequence of cytosolic domain for fusion proteins produced from
SELPL; Artificial Sequence
149;
CTGCTGATGATCATCCACGACAGAAGAGAGTTCGCCAAGTTCGAGAAGGAGAAG
ATGAACGCCAAGTGGGACACCGGCGAGAACCCCATCTACAAGAGCGCCGTGACC
ACCGTGGTGAACCCCAAGTACGAGGGCAAG; Coding sequence of cytosolic domain for
fusion proteins produced from ITGB1; Artificial Sequence
150: LLMIIHDRREFAKFEKEKMNAKWDTGENPIYKSAVTTVVNPKYEGK; Peptide
sequence of cytosolic domain for fusion proteins produced from ITGB1; Artificial Sequence

TABLE 6
Targeting Moieties

SEQ ID NO: Sequence; Source
151:
CAAGTGCAGCTCGTCCAATCCGGGGCCGAGGTCAAGAAACCAGGTGCATCCGTCA
AGGTGTCTTGCAAGGCCAGCGGGTATACGTTCACTGATTACGAAATGCATTGGGT
CCGTCAGGCCCCCGGGCAAGGCCTTGAGTGGATGGGCGCTCTTGATCCTAAAACA
GGGGATACTGCTTACAGCCAGAAATTCAAAGGAAGAGTGACACTTACAGCAGAC
AAAAGTACTTCCACCGCATACATGGAACTGAGTTCACTCACATCCGAAGACACTG
CTGTATACTACTGTACAAGATTTTATTCTTATACCTATTGGGGCCAGGGGACTCTC
GTCACAGTGTCTAGCTCCTCAGGTGGAAGCTCCAGATCTTCTAGCTCCGGTGGTGG
CGGCTCCGGCGGGGGGGGCGATGTAGTAATGACTCAATCCCCTCTGTCATTGCCT
GTCACCCCTGGCGAGCCAGCCAGCATCTCTTGCAGATCTTCTCAAAGCCTCGTGCA
TTCCAATGGAAACACGTACCTGCATTGGTACCTGCAGAAACCTGGACAGTCACCA
CAACTGCTGATCTATAAGGTGAGCAACCGGTTCAGTGGAGTGCCGGATAGGTTTA
GCGGATCTGGCAGCGGCACGGACTTCACACTGAAGATAAGCCGTGTCGAAGCTGA
GGATGTTGGAGTCTATTATTGCTCACAGAACACTCATGTGCCACCAACCTTTGGGC
AAGGAACTAAACTTGAGATTAAG; coding sequence of GC33 scFv
152:
QVQLVQSGAEVKKPGASVKVSCKASGYTFTDYEMHWVRQAPGQGLEWMGALDPK
TGDTAYSQKFKGRVTLTADKSTSTAYMELSSLTSEDTAVYYCTRFYSYTYWGQGTLV
TVSSSSGGSSRSSSSGGGGSGGGGDVVMTQSPLSLPVTPGEPASISCRSSQSLVHSNGN
TYLHWYLQKPGQSPQLLIYKVSNRFSGVPDRESGSGSGTDFTLKISRVEAEDVGVYYC
SQNTHVPPTFGQGTKLEIK; peptide sequence of GC33 scFv
153:
CAAATGCAGCTGGTTCAAAGTGGTGCTGAGGTCAAAAAACCAGGCGCGAGCGTA
AAACTGTCCTGTAAAGCCAGCGGATACACCTTCTCCAGCTACTGGATGCACTGGG
TCCGACAGGCCCCAGGGCAGAGGCTCGAATGGATGGGCGAGATCAACCCCGGCA
ATGGTCACACCAATTACAATGAAAAGTTCAAGAGCCGCGTGACCATTACTGTCGA
TAAATCTGCATCTACAGCATACATGGAACTTTCCAGCCTTAGATCAGAGGACACA
GCCGTATATTATTGTGCCAAGATCTGGGGACCGTCCCTTACAAGTCCTTTCGATTA
CTGGGGTCAGGGGACGCTTGTAACGGTATCCGGGGGGGGAGGTTCCGGCGGAGG
CGGTTCAGGAGGGGGCGGTTCCGGGGGCGGTGGATCTAATTTTATGCTTACGCAA
CCCCCGTCTGTAAGTGTTTCCCCAGGGAAAACCGCTCGAATAACCTGTCGAGGAG
ACAACCTCGGCGATGTTAATGTCCATTGGTATCAACAGCGACCTGGGCAAGCCCC
GGTTTTGGTCATGTACTATGATGCGGACCGCCCCAGTGGCATACCGGAACGGTTC
AGTGGAAGTAACTCTGGCAATACTGCAACGCTGACCATCAGTGGCGTTGAGGCGG
GTGACGAGGCAGATTATTACTGTCAGGTCTGGGACCGGACCAGTGAGTATGTTTT
CGGAACCGGCACAAAAGTAACTGTACTCGGG; coding sequence of 6A6 scFv
154:
QMQLVQSGAEVKKPGASVKLSCKASGYTFSSYWMHWVRQAPGQRLEWMGEINPGN
GHTNYNEKFKSRVTITVDKSASTAYMELSSLRSEDTAVYYCAKIWGPSLTSPFDYWG
QGTLVTVSGGGGSGGGGSGGGGSGGGGSNFMLTQPPSVSVSPGKTARITCRGDNLGD
VNVHWYQQRPGQAPVLVMYYDADRPSGIPERFSGSNSGNTATLTISGVEAGDEADY
YCQVWDRTSEYVFGTGTKVTVLG; peptide sequence of 6A6 scFv
155:
GAAGTGCAGCTTGTAGAAAGTGGGGGGGGACTGGTACAGCCGGGCGGGAGCCTC
AGATTGTCATGCGCCGCTTCTGGTTTCACTTTTTCTTCCTACGGTATGTCCTGGGTT
AGACAAGCTCCTGGGAAGGGTCTTGAGTGGGTGGCTACAATTACTAGTGGTGGTT
CATACACGTACTATGTTGACAGTGTTAAGGGGCGATTTACTATAAGTAGAGATAA
TGCCAAGAACACACTCTACCTTCAGATGAATAGCTTGCGGGCGGAAGATACAGCA
GTTTATTATTGCGTTCGGATTGGCGAGGACGCACTCGACTATTGGGGACAAGGGA
CTCTTGTTACGGTGTCTAGTGGGGGGGGAGGTTCCGGCGGAGGCGGTTCAGGAGG
GGGCGGTTCCGGGGGCGGTGGATCTGACATCCAGATGACGCAATCCCCAAGTTCA
CTTAGCGCTTCAGTCGGCGACCGCGTTACCATAACATGCAGAGCAAGTCAAGACA
TTGCAGGGAGTCTTAATTGGTTGCAGAAGCCAGGTAAAGCTATAAAGCGCCTTAT
ATATGCCACCAGCAGTCTGGATTCTGGTGTACCGAAGAGATTCAGCGGTTCCAGA
AGTGGCAGTGACTATACTCTGACCATTTCTTCTCTCCAGCCTGAAGATTTCGCCAC
TTACTATTGTCTGCAATATGGTTCTTTCCCACCAACATTCGGACAAGGTACTAAGG
TCGAGATTAAG; coding sequence of ALAC scFv
156
EVQLVESGGGLVQPGGSLRLSCAASGFTFSSYGMSWVRQAPGKGLEWVATITSGGSY
TYYVDSVKGRFTISRDNAKNTLYLQMNSLRAEDTAVYYCVRIGEDALDYWGQGTLV
TVSSGGGGSGGGGSGGGGSGGGGSDIQMTQSPSSLSASVGDRVTITCRASQDIAGSLN
WLQKPGKAIKRLIYATSSLDSGVPKRFSGSRSGSDYTLTISSLQPEDFATYYCLQYGSF
PPTFGQGTKVEIK; peptide sequence of ALAC scFv
157: TGCCTGGTGAGCGGCGGCATGGCCTGC; coding sequence of peptide selected from
a random peptide library; Artificial Sequence
158: CLVSGGMAC; peptide sequence of peptide selected from a random peptide library;
Artificial Sequence
159: TGCCTGGTGAGCGGCTGCAACACCTGC; coding sequence of peptide selected from
a random peptide library; Artificial Sequence
160: CLVSGCNTC; peptide sequence of peptide selected from a random peptide library;
Artificial Sequence
161: TGCGACCTGGTGAGCGGCTACGGCTGC; coding sequence of peptide selected from
a random peptide library; Artificial Sequence
162: CDLVSGYGC, peptide sequence of peptide selected from a random peptide library;
Artificial Sequence
163: TGCCTGGTGAGCACCAGCGCCACCTGC; coding sequence of peptide selected from
a random peptide library; Artificial Sequence
164: CLVSTSATC; peptide sequence of peptide selected from a random peptide library;
Artificial Sequence
165: TGCACCGCCCTGGTGAGCCAGACCTGC; coding sequence of peptide selected from
a random peptide library; Artificial Sequence
166: CTALVSQTC; peptide sequence of peptide selected from a random peptide library;
Artificial Sequence
167: TGCTGGCTGGTGAGCGGCATCGGCTGC; coding sequence of peptide selected from
a random peptide library; Artificial Sequence
168: CWLVSGIGC; peptide sequence of peptide selected from a random peptide library;
Artificial Sequence
169: TGCCTGGTGAGCAGCGTGTTCCCCTGC; coding sequence of peptide selected from
a random peptide library; Artificial Sequence
170: CLVSSVFPC; peptide sequence of peptide selected from a random peptide library;
Artificial Sequence
171: TGCCCCAGCCTGGTGAGCAGCGTGTGC; coding sequence of peptide selected from
a random peptide library; Artificial Sequence
172: CPSLVSSVC; peptide sequence of peptide selected from a random peptide library;
Artificial Sequence
173: TGCGGCGTGAGCCTGGTGAGCACCTGC; coding sequence of peptide selected from
a random peptide library; Artificial Sequence
174: CGVSLVSTC; peptide sequence of peptide selected from a random peptide library;
Artificial Sequence
175: TGCCAGCTGGTGAGCGGCGAGCCCTGC; coding sequence of peptide selected from
a random peptide library; Artificial Sequence
176: CQLVSGEPC; peptide sequence of peptide selected from a random peptide library;
Artificial Sequence
177: TGCAACCTGGTGAGCAGAAGACTGTGC; coding sequence of peptide selected from
a random peptide library; Artificial Sequence
178: CNLVSRRLC; peptide sequence of peptide selected from a random peptide library;
Artificial Sequence
179: TGCCTGGTGAGCTGGAGAGGCAGCTGC; coding sequence of peptide selected from
a random peptide library; Artificial Sequence
180: CLVSWRGSC; peptide sequence of peptide selected from a random peptide library;
Artificial Sequence
181: TGCGACCACTTCCTGGTGAGCCCCTGC; coding sequence of peptide selected from
a random peptide library; Artificial Sequence
182: CDHFLVSPC; peptide sequence of peptide selected from a random peptide library;
Artificial Sequence
183: TGCGGCAGAGGCCTGGTGAGCCTGTGC; coding sequence of peptide selected from
a random peptide library: Artificial Sequence
184: CGRGLVSLC; peptide sequence of peptide selected from a random peptide library;
Artificial Sequence
185: TGCTTCCCCGTGGCCCTGGTGAGCTGC; coding sequence of peptide selected from a
random peptide library; Artificial Sequence
186: CFPVALVSC; peptide sequence of peptide selected from a random peptide library;
Artificial Sequence
187: TGCAGATGGAGCAGCCTGGTGAGCTGC, coding sequence of peptide selected from
a random peptide library; Artificial Sequence
188: CRWSSLVSC; peptide sequence of peptide selected from a random peptide library;
Artificial Sequence
189: TGCTGGAGCAAGAGCCTGGTGAGCTGC; coding sequence of peptide selected from
a random peptide library, Artificial Sequence
190: CWSKSLVSC; peptide sequence of peptide selected from a random peptide library;
Artificial Sequence
191: TGCCCCGGCAGAAGCCTGGTGAGCTGC; coding sequence of peptide selected from
a random peptide library; Artificial Sequence
192: CPGRSLVSC; peptide sequence of peptide selected from a random peptide library;
Artificial Sequence
193: ACCCACAGACCCCCCATGTGGAGCCCCGTGTGGCCC; coding sequence of
peptide selected from a random peptide library; Artificial Sequence
194: THRPPMWSPVWP; peptide sequence of peptide selected from a random peptide library;
Artificial Sequence
195: ACCCACGTGAGCCCCAACCAGGGCGGCCTGCCCAGC; coding sequence of PEPN
196: THVSPNQGGLPS; peptide sequence of PEPN

TABLE 7
Fusion Protein Comprising Isopeptide Domain and VLM or Chimeric VLM

SEQ ID NO: Sequence; Source
197:
GACTACAAAGACCACGACGGGGATTATAAAGATCATGACATCGATTACAAGGAT
GACGATGATAAGGGCTCTGGCGACAGCGCAACACACATCAAGTTCTCAAAACGG
GATGAGGATGGAAAAGAACTGGCCGGAGCGACAATGGAACTGAGAGATTCTTCC
GGCAAGACTATCTCCACATGGATTAGTGACGGGCAAGTCAAAGACTTCTACTTGT
ACCCCGGTAAGTACACCTTCGTTGAGACTGCCGCTCCTGACGGGTATGAAGTCGC
CACGGCGATCACATTCACTGTGAATGAACAGGGACAGGTGACGGTCAATGGAGG
ATCCCCCGCCAACCTGAAGGCCCTGGAGGCCCAGAAGCAGAAGGAGCAGAGACA
GGCCGCCGAGGAGCTGGCCAACGCCAAGAAGCTGAAGGAGCAGCTGGAGAAGCG
GGAGGTGCTGGTCCCCGAGGGGCCCTTGTACCGCGTGGCTGGCACAGCTGTCTCC
ATCTCCTGCAATGTGACCGGCTATGAGGGCCCTGCCCAGCAGAACTTCGAGTGGT
TCCTGTATAGGCCCGAGGCCCCAGATACTGCACTGGGCATTGTCAGTACCAAGGA
TACCCAGTTCTCCTATGCTGTCTTCAAGTCCCGAGTGGTGGCGGGTGAGGTGCAGG
TGCAGCGCCTACAAGGTGATGCCGTGGTGCTCAAGATTGCCCGCCTGCAGGCCCA
GGATGCCGGCATTTATGAGTGCCACACCCCCTCCACTGATACCCGCTACCTGGGC
AGCTACAGCGGCAAGGTGGAGCTGAGAGTTCTTCCAGATGTCCTCCAGGTGTCTG
CTGCCCCCCCAGGGCCCCGAGGCCGCCAGGCCCCAACCTCACCCCCACGCATGAC
GGTGCATGAGGGGCAGGAGCTGGCACTGGGCTGCCTGGCGAGGACAAGCACACA
GAAGCACACACACCTGGCAGTGTCCTTTGGGCGATCTGTGCCCGAGGCACCAGTT
GGGCGGTCAACTCTGCAGGAAGTGGTGGGAATCCGGTCAGACTTGGCCGTGGAGG
CTGGAGCTCCCTATGCTGAGCGATTGGCTGCAGGGGAGCTTCGTCTGGGCAAGGA
AGGGACCGATCGGTACCGCATGGTAGTAGGGGGTGCCCAGGCAGGGGACGCAGG
CACCTACCACTGCACTGCCGCTGAGTGGATTCAGGATCCTGATGGCAGCTGGGCC
CAGATTGCAGAGAAAAGGGCCGTCCTGGCCCACGTGGATGTGCAGACGCTGTCCA
GCCAGCTGGCAGTGACAGTGGGGCCTGGTGAACGTCGGATCGGCCCAGGGGAGC
CCTTGGAACTGCTGTGCAATGTGTCAGGGGCACTTCCCCCAGCAGGCCGTCATGCT
GCATACTCTGTAGGTTGGGAGATGGCACCTGCGGGGGCACCTGGGCCCGGCCGCC
TGGTAGCCCAGCTGGACACAGAGGGTGTGGGCAGCCTGGGCCCTGGCTATGAGGG
CCGACACATTGCCATGGAGAAGGTGGCATCCAGAACATACCGGCTACGGCTAGAG
GCTGCCAGGCCTGGTGATGCGGGCACCTACCGCTGCCTCGCCAAAGCCTATGTTC
GAGGGTCTGGGACCCGGCTTCGTGAAGCAGCCAGTGCCCGTTCCCGGCCTCTCCC
TGTACATGTGCGGGAGGAAGGTGTGGTGCTGGAGGCTGTGGCATGGCTAGCAGGA
GGCACAGTGTACCGCGGGGAGACTGCCTCCCTGCTGTGCAACATCTCTGTGCGGG
GTGGCCCCCCAGGACTGCGGCTGGCCGCCAGCTGGTGGGTGGAGCGACCAGAGG
ACGGAGAGCTCAGCTCTGTCCCTGCCCAGCTGGTGGGTGGCGTAGGCCAGGATGG
TGTGGCAGAGCTGGGAGTCCGGCCTGGAGGAGGCCCTGTCAGCGTAGAGCTGGTG
GGGCCCCGAAGCCATCGGCTGAGACTACACAGCTTGGGGCCCGAGGATGAAGGC
GTGTACCACTGTGCCCCCAGCGCCTGGGTGCAGCATGCCGACTACAGCTGGTACC
AGGCGGGCAGTGCCCGCTCAGGGCCTGTTACAGTCTACCCCTACATGCATGCCCT
GGACACCCTATTTGTGCCTCTGCTGGTGGGTACAGGGGTGGCCCTAGTCACTGGTG
CCACTGTCCTTGGTACCATCACTTGCTGCTTCATGAAGAGGCTTCGAAAACGG;
Coding sequence of Isopeptide(1) domain-IGSF8 VLM.
198:
DYKDHDGDYKDHDIDYKDDDDKGSGDSATHIKFSKRDEDGKELAGATMELRDSSGK
TISTWISDGQVKDFYLYPGKYTFVETAAPDGYEVATAITFTVNEQGQVTVNGGSPANL
KALEAQKQKEQRQAAEELANAKKLKEQLEKREVLVPEGPLYRVAGTAVSISCNVTG
YEGPAQQNFEWFLYRPEAPDTALGIVSTKDTQFSYAVFKSRVVAGEVQVQRLQGDA
VVLKIARLQAQDAGIYECHTPSTDTRYLGSYSGKVELRVLPDVLQVSAAPPGPRGRQ
APTSPPRMTVHEGQELALGCLARTSTQKHTHLAVSFGRSVPEAPVGRSTLQEVVGIRS
DLAVEAGAPYAERLAAGELRLGKEGTDRYRMVVGGAQAGDAGTYHCTAAEWIQDP
DGSWAQIAEKRAVLAHVDVQTLSSQLAVTVGPGERRIGPGEPLELLCNVSGALPPAG
RHAAYSVGWEMAPAGAPGPGRLVAQLDTEGVGSLGPGYEGRHIAMEKVASRTYRLR
LEAARPGDAGTYRCLAKAYVRGSGTRLREAASARSRPLPVHVREEGVVLEAVAWLA
GGTVYRGETASLLCNISVRGGPPGLRLAASWWVERPEDGELSSVPAQLVGGVGQDG
VAELGVRPGGGPVSVELVGPRSHRLRLHSLGPEDEGVYHCAPSAWVQHADYSWYQA
GSARSGPVTVYPYMHALDTLFVPLLVGTGVALVTGATVLGTITCCEMKRLRKR;
Peptide sequence of Isopeptide(1) domain-IGSF8 VLM
199:
GACTACAAAGACCACGACGGGGATTATAAAGATCATGACATCGATTACAAGGAT
GACGATGATAAGGGCTCTGGCGGATCCCATATGAAGCCGCTGCGTGGTGCCGTGT
TTAGCCTGCAGAAACAGCATCCCGACTATCCCGATATCTATGGCGCGATTGATCA
GAATGGGACCTATCAAAATGTGCGTACCGGCGAAGATGGTAAACTGACCTTTAAG
AATCTGAGCGATGGCAAATATCGCCTGTTTGAAAATAGCGAACCCGCTGGCTATA
AACCGGTGCAGAATAAGCCGATTGTGGCGTTTCAGATTGTGAATGGCGAAGTGCG
TGATGTGACCAGCATTGTGCCGCAGGATATTCCGGCTACATATGAATTTACCAAC
GGTAAACATTATATCACCAATGAACCGATACCGCCGAAAGGATCCCCCGCCAACC
TGAAGGCCCTGGAGGCCCAGAAGCAGAAGGAGCAGAGACAGGCCGCCGAGGAGC
TGGCCAACGCCAAGAAGCTGAAGGAGCAGCTGGAGAAGCGGGAGGTGCTGGTCC
CCGAGGGGCCCTTGTACCGCGTGGCTGGCACAGCTGTCTCCATCTCCTGCAATGTG
ACCGGCTATGAGGGCCCTGCCCAGCAGAACTTCGAGTGGTTCCTGTATAGGCCCG
AGGCCCCAGATACTGCACTGGGCATTGTCAGTACCAAGGATACCCAGTTCTCCTA
TGCTGTCTTCAAGTCCCGAGTGGTGGCGGGTGAGGTGCAGGTGCAGCGCCTACAA
GGTGATGCCGTGGTGCTCAAGATTGCCCGCCTGCAGGCCCAGGATGCCGGCATTT
ATGAGTGCCACACCCCCTCCACTGATACCCGCTACCTGGGCAGCTACAGCGGCAA
GGTGGAGCTGAGAGTTCTTCCAGATGTCCTCCAGGTGTCTGCTGCCCCCCCAGGGC
CCCGAGGCCGCCAGGCCCCAACCTCACCCCCACGCATGACGGTGCATGAGGGGCA
GGAGCTGGCACTGGGCTGCCTGGCGAGGACAAGCACACAGAAGCACACACACCT
GGCAGTGTCCTTTGGGCGATCTGTGCCCGAGGCACCAGTTGGGGGGTCAACTCTG
CAGGAAGTGGTGGGAATCCGGTCAGACTTGGCCGTGGAGGCTGGAGCTCCCTATG
CTGAGCGATTGGCTGCAGGGGAGCTTCGTCTGGGCAAGGAAGGGACCGATCGGTA
CCGCATGGTAGTAGGGGGTGCCCAGGCAGGGGACGCAGGCACCTACCACTGCACT
GCCGCTGAGTGGATTCAGGATCCTGATGGCAGCTGGGCCCAGATTGCAGAGAAAA
GGGCCGTCCTGGCCCACGTGGATGTGCAGACGCTGTCCAGCCAGCTGGCAGTGAC
AGTGGGGCCTGGTGAACGTCGGATCGGCCCAGGGGAGCCCTTGGAACTGCTGTGC
AATGTGTCAGGGGCACTTCCCCCAGCAGGCCGTCATGCTGCATACTCTGTAGGTTG
GGAGATGGCACCTGCGGGGGCACCTGGGCCCGGCCGCCTGGTAGCCCAGCTGGAC
ACAGAGGGTGTGGGCAGCCTGGGCCCTGGCTATGAGGGCCGACACATTGCCATGG
AGAAGGTGGCATCCAGAACATACCGGCTACGGCTAGAGGCTGCCAGGCCTGGTG
ATGCGGGCACCTACCGCTGCCTCGCCAAAGCCTATGTTCGAGGGTCTGGGACCCG
GCTTCGTGAAGCAGCCAGTGCCCGTTCCCGGCCTCTCCCTGTACATGTGCGGGAG
GAAGGTGTGGTGCTGGAGGCTGTGGCATGGCTAGCAGGAGGCACAGTGTACCGC
GGGGAGACTGCCTCCCTGCTGTGCAACATCTCTGTGCGGGGTGGCCCCCCAGGAC
TGCGGCTGGCCGCCAGCTGGTGGGTGGAGCGACCAGAGGACGGAGAGCTCAGCT
CTGTCCCTGCCCAGCTGGTGGGTGGCGTAGGCCAGGATGGTGTGGCAGAGCTGGG
AGTCCGGCCTGGAGGAGGCCCTGTCAGCGTAGAGCTGGTGGGGCCCCGAAGCCAT
CGGCTGAGACTACACAGCTTGGGGCCCGAGGATGAAGGCGTGTACCACTGTGCCC
CCAGCGCCTGGGTGCAGCATGCCGACTACAGCTGGTACCAGGCGGGCAGTGCCCG
CTCAGGGCCTGTTACAGTCTACCCCTACATGCATGCCCTGGACACCCTATTTGTGC
CTCTGCTGGTGGGTACAGGGGTGGCCCTAGTCACTGGTGCCACTGTCCTTGGTACC
ATCACTTGCTGCTTCATGAAGAGGCTTCGAAAACGG; Coding sequence of
Isopeptide(2) domain-IGSF8 VLM
200:
DYKDHDGDYKDHDIDYKDDDDKGSGGSHMKPLRGAVFSLQKQHPDYPDIYGAIDQN
GTYQNVRTGEDGKLTFKNLSDGKYRLFENSEPAGYKPVQNKPIVAFQIVNGEVRDVT
SIVPQDIPATYEFTNGKHYITNEPIPPKGSPANLKALEAQKQKEQRQAAEELANAKKL
KEQLEKREVLVPEGPLYRVAGTAVSISCNVTGYEGPAQQNFEWFLYRPEAPDTALGIV
STKDTQFSYAVFKSRVVAGEVQVQRLQGDAVVLKIARLQAQDAGIYECHTPSTDTRY
LGSYSGKVELRVLPDVLQVSAAPPGPRGRQAPTSPPRMTVHEGQELALGCLARTSTQ
KHTHLAVSFGRSVPEAPVGRSTLQEVVGIRSDLAVEAGAPYAERLAAGELRLGKEGT
DRYRMVVGGAQAGDAGTYHCTAAEWIQDPDGSWAQIAEKRAVLAHVDVQTLSSQL
AVTVGPGERRIGPGEPLELLCNVSGALPPAGRHAAYSVGWEMAPAGAPGPGRLVAQL
DTEGVGSLGPGYEGRHIAMEKVASRTYRLRLEAARPGDAGTYRCLAKAYVRGSGTR
LREAASARSRPLPVHVREEGVVLEAVAWLAGGTVYRGETASLLCNISVRGGPPGLRL
AASWWVERPEDGELSSVPAQLVGGVGQDGVAELGVRPGGGPVSVELVGPRSHRLRL
HSLGPEDEGVYHCAPSAWVQHADYSWYQAGSARSGPVTVYPYMHALDTLFVPLLV
GTGVALVTGATVLGTITCCFMKRLRKR; Peptide sequence of Isopeptide(2) domain-
IGSF8 VLM
201:
GACTACAAAGACCACGACGGGGATTATAAAGATCATGACATCGATTACAAGGAT
GACGATGATAAGGGCTCTGGCGACAGCGCAACACACATCAAGTTCTCAAAACGG
GATGAGGATGGAAAAGAACTGGCCGGAGCGACAATGGAACTGAGAGATTCTTCC
GGCAAGACTATCTCCACATGGATTAGTGACGGGCAAGTCAAAGACTTCTACTTGT
ACCCCGGTAAGTACACCTTCGTTGAGACTGCCGCTCCTGACGGGTATGAAGTCGC
CACGGCGATCACATTCACTGTGAATGAACAGGGACAGGTGACGGTCAATGGAGG
CGGTGGCGGCTCTGGCGGAGGAGGCTCAGGATCCCATATGAAGCCGCTGCGTGGT
GCCGTGTTTAGCCTGCAGAAACAGCATCCCGACTATCCCGATATCTATGGCGCGA
TTGATCAGAATGGGACCTATCAAAATGTGCGTACCGGCGAAGATGGTAAACTGAC
CTTTAAGAATCTGAGCGATGGCAAATATCGCCTGTTTGAAAATAGCGAACCCGCT
GGCTATAAACCGGTGCAGAATAAGCCGATTGTGGCGTTTCAGATTGTGAATGGCG
AAGTGCGTGATGTGACCAGCATTGTGCCGCAGGATATTCCGGCTACATATGAATT
TACCAACGGTAAACATTATATCACCAATGAACCGATACCGCCGAAAGGATCCCCC
GCCAACCTGAAGGCCCTGGAGGCCCAGAAGCAGAAGGAGCAGAGACAGGCCGCC
GAGGAGCTGGCCAACGCCAAGAAGCTGAAGGAGCAGCTGGAGAAGCGGGAGGTG
CTGGTCCCCGAGGGGCCCTTGTACCGCGTGGCTGGCACAGCTGTCTCCATCTCCTG
CAATGTGACCGGCTATGAGGGCCCTGCCCAGCAGAACTTCGAGTGGTTCCTGTAT
AGGCCCGAGGCCCCAGATACTGCACTGGGCATTGTCAGTACCAAGGATACCCAGT
TCTCCTATGCTGTCTTCAAGTCCCGAGTGGTGGCGGGTGAGGTGCAGGTGCAGCG
CCTACAAGGTGATGCCGTGGTGCTCAAGATTGCCCGCCTGCAGGCCCAGGATGCC
GGCATTTATGAGTGCCACACCCCCTCCACTGATACCCGCTACCTGGGCAGCTACA
GCGGCAAGGTGGAGCTGAGAGTTCTTCCAGATGTCCTCCAGGTGTCTGCTGCCCC
CCCAGGGCCCCGAGGCCGCCAGGCCCCAACCTCACCCCCACGCATGACGGTGCAT
GAGGGGCAGGAGCTGGCACTGGGCTGCCTGGCGAGGACAAGCACACAGAAGCAC
ACACACCTGGCAGTGTCCTTTGGGCGATCTGTGCCCGAGGCACCAGTTGGGCGGT
CAACTCTGCAGGAAGTGGTGGGAATCCGGTCAGACTTGGCCGTGGAGGCTGGAGC
TCCCTATGCTGAGCGATTGGCTGCAGGGGAGCTTCGTCTGGGCAAGGAAGGGACC
GATCGGTACCGCATGGTAGTAGGGGGTGCCCAGGCAGGGGACGCAGGCACCTAC
CACTGCACTGCCGCTGAGTGGATTCAGGATCCTGATGGCAGCTGGGCCCAGATTG
CAGAGAAAAGGGCCGTCCTGGCCCACGTGGATGTGCAGACGCTGTCCAGCCAGCT
GGCAGTGACAGTGGGGCCTGGTGAACGTCGGATCGGCCCAGGGGAGCCCTTGGA
ACTGCTGTGCAATGTGTCAGGGGCACTTCCCCCAGCAGGCCGTCATGCTGCATACT
CTGTAGGTTGGGAGATGGCACCTGCGGGGGCACCTGGGCCCGGCCGCCTGGTAGC
CCAGCTGGACACAGAGGGTGTGGGCAGCCTGGGCCCTGGCTATGAGGGCCGACA
CATTGCCATGGAGAAGGTGGCATCCAGAACATACCGGCTACGGCTAGAGGCTGCC
AGGCCTGGTGATGCGGGCACCTACCGCTGCCTCGCCAAAGCCTATGTTCGAGGGT
CTGGGACCCGGCTTCGTGAAGCAGCCAGTGCCCGTTCCCGGCCTCTCCCTGTACAT
GTGCGGGAGGAAGGTGTGGTGCTGGAGGCTGTGGCATGGCTAGCAGGAGGCACA
GTGTACCGCGGGGAGACTGCCTCCCTGCTGTGCAACATCTCTGTGCGGGGTGGCC
CCCCAGGACTGCGGCTGGCCGCCAGCTGGTGGGTGGAGCGACCAGAGGACGGAG
AGCTCAGCTCTGTCCCTGCCCAGCTGGTGGGTGGCGTAGGCCAGGATGGTGTGGC
AGAGCTGGGAGTCCGGCCTGGAGGAGGCCCTGTCAGCGTAGAGCTGGTGGGGCC
CCGAAGCCATCGGCTGAGACTACACAGCTTGGGGCCCGAGGATGAAGGCGTGTAC
CACTGTGCCCCCAGCGCCTGGGTGCAGCATGCCGACTACAGCTGGTACCAGGCGG
GCAGTGCCCGCTCAGGGCCTGTTACAGTCTACCCCTACATGCATGCCCTGGACACC
CTATTTGTGCCTCTGCTGGTGGGTACAGGGGTGGCCCTAGTCACTGGTGCCACTGT
CCTTGGTACCATCACTTGCTGCTTCATGAAGAGGCTTCGAAAACGG; Coding
sequence of Isopeptide(1) + Isopeptide(2) domains-IGSF8 VLM
202:
DYKDHDGDYKDHDIDYKDDDDKGSGDSATHIKFSKRDEDGKELAGATMELRDSSGK
TISTWISDGQVKDFYLYPGKYTFVETAAPDGYEVATAITFTVNEQGQVTVNGGGGGS
GGGGSGSHMKPLRGAVFSLQKQHPDYPDIYGAIDQNGTYQNVRTGEDGKLTFKNLS
DGKYRLFENSEPAGYKPVQNKPIVAFQIVNGEVRDVTSIVPQDIPATYEFTNGKHYITN
EPIPPKGSPANLKALEAQKQKEQRQAAEELANAKKLKEQLEKREVLVPEGPLYRVAG
TAVSISCNVTGYEGPAQQNFEWFLYRPEAPDTALGIVSTKDTQFSYAVFKSRVVAGEV
QVQRLQGDAVVLKIARLQAQDAGIYECHTPSTDTRYLGSYSGKVELRVLPDVLQVSA
APPGPRGRQAPTSPPRMTVHEGQELALGCLARTSTQKHTHLAVSFGRSVPEAPVGRST
LQBVVGIRSDLAVEAGAPYAERLAAGELRLGKEGTDRYRMVVGGAQAGDAGTYHC
TAAEWIQDPDGSWAQIAEKRAVLAHVDVQTLSSQLAVTVGPGERRIGPGEPLELLCN
VSGALPPAGRHAAYSVGWEMAPAGAPGPGRLVAQLDTEGVGSLGPGYEGRHIAMEK
VASRTYRLRLEAARPGDAGTYRCLAKAYVRGSGTRLREAASARSRPLPVHVREEGVV
LEAVAWLAGGTVYRGETASLLCNISVRGGPPGLRLAASWWVERPEDGELSSVPAQLV
GGVGQDGVAELGVRPGGGPVSVELVGPRSHRLRLHSLGPEDEGVYHCAPSAWVQHA
DYSWYQAGSARSGPVTVYPYMHALDTLEVPLLVGTGVALVTGATVIGTITCCFMKR.
LRKR; Peptide sequence of Isopeptide(1) + Isopeptide(2) domains-IGSF8 VLM
203:
GACTACAAAGACCACGACGGGGATTATAAAGATCATGACATCGATTACAAGGAT
GACGATGATAAGTCTTCTGGGTTGGTCCCCAGAGGCAGCCACATGGCTTCTATGA
CCGGGGGACAACAAATGGGCAGAGGCTCAAGCGGCCTTAGCGGTGAAACTGGAC
AGAGCGGTAATACCACGATTGAGGAGGACTCCACTACCCATGTCAAATTTTCTAA
AAGAGACGCGAACGGAAAGGAATTGGCTGGCGCGATGATTGAACTGAGGAACCT
CTCTGGACAGACCATACAAAGCTGGATTTCAGACGGGACCGTTAAGGTTTTCTAT
CTGATGCCTGGCACCTACCAGTTTGTTGAAACTGCGGCGCCAGAAGGATATGAGT
TGGCGGCTCCCATCACATTCACCATTGATGAAAAGGGTCAAATTTGGGTCGACTC
AGCCATGGTTGATACCTTATCAGGTTTATCAAGTGAGCAAGGTCAGTCCGGTGAT
GACAGCGCAACACACATCAAGTTCTCAAAACGGGATGAGGATGGAAAAGAACTG
GCCGGAGCGACAATGGAACTGAGAGATTCTTCCGGCAAGACTATCTCCACATGGA
TTAGTGACGGGCAAGTCAAAGACTTCTACTTGTACCCCGGTAAGTACACCTTCGTT
GAGACTGCCGCTCCTGACGGGTATGAAGTCGCCACGGCGATCACATTCACTGTGA
ATGAACAGGGACAGGTGACGGTCAATGGAGGCGGTGGCGGCTCTGGCGGAGGAG
GCTCAGGATCCCATATGAAGCCGCTGCGTGGTGCCGTGTTTAGCCTGCAGAAACA
GCATCCCGACTATCCCGATATCTATGGCGCGATTGATCAGAATGGGACCTATCAA
AATGTGCGTACCGGCGAAGATGGTAAACTGACCTTTAAGAATCTGAGCGATGGCA
AATATCGCCTGTTTGAAAATAGCGAACCCGCTGGCTATAAACCGGTGCAGAATAA
GCCGATTGTGGCGTTTCAGATTGTGAATGGCGAAGTGCGTGATGTGACCAGCATT
GTGCCGCAGGATATTCCGGCTACATATGAATTTACCAACGGTAAACATTATATCA
CCAATGAACCGATACCGCCGAAAGGATCCCCCGCCAACCTGAAGGCCCTGGAGGC
CCAGAAGCAGAAGGAGCAGAGACAGGCCGCCGAGGAGCTGGCCAACGCCAAGA
AGCTGAAGGAGCAGCTGGAGAAGCGGGAGGTGCTGGTCCCCGAGGGGCCCTTGT
ACCGCGTGGCTGGCACAGCTGTCTCCATCTCCTGCAATGTGACCGGCTATGAGGG
CCCTGCCCAGCAGAACTTCGAGTGGTTCCTGTATAGGCCCGAGGCCCCAGATACT
GCACTGGGCATTGTCAGTACCAAGGATACCCAGTTCTCCTATGCTGTCTTCAAGTC
CCGAGTGGTGGCGGGTGAGGTGCAGGTGCAGCGCCTACAAGGTGATGCCGTGGTG
CTCAAGATTGCCCGCCTGCAGGCCCAGGATGCCGGCATTTATGAGTGCCACACCC
CCTCCACTGATACCCGCTACCTGGGCAGCTACAGCGGCAAGGTGGAGCTGAGAGT
TCTTCCAGATGTCCTCCAGGTGTCTGCTGCCCCCCCAGGGCCCCGAGGCCGCCAGG
CCCCAACCTCACCCCCACGCATGACGGTGCATGAGGGGCAGGAGCTGGCACTGGG
CTGCCTGGCGAGGACAAGCACACAGAAGCACACACACCTGGCAGTGTCCTTTGGG
CGATCTGTGCCCGAGGCACCAGTTGGGCGGTCAACTCTGCAGGAAGTGGTGGGAA
TCCGGTCAGACTTGGCCGTGGAGGCTGGAGCTCCCTATGCTGAGCGATTGGCTGC
AGGGGAGCTTCGTCTGGGCAAGGAAGGGACCGATCGGTACCGCATGGTAGTAGG
GGGTGCCCAGGCAGGGGACGCAGGCACCTACCACTGCACTGCCGCTGAGTGGATT
CAGGATCCTGATGGCAGCTGGGCCCAGATTGCAGAGAAAAGGGCCGTCCTGGCCC
ACGTGGATGTGCAGACGCTGTCCAGCCAGCTGGCAGTGACAGTGGGGCCTGGTGA
ACGTCGGATCGGCCCAGGGGAGCCCTTGGAACTGCTGTGCAATGTGTCAGGGGCA
CTTCCCCCAGCAGGCCGTCATGCTGCATACTCTGTAGGTTGGGAGATGGCACCTGC
GGGGGCACCTGGGCCCGGCCGCCTGGTAGCCCAGCTGGACACAGAGGGTGTGGG
CAGCCTGGGCCCTGGCTATGAGGGCCGACACATTGCCATGGAGAAGGTGGCATCC
AGAACATACCGGCTACGGCTAGAGGCTGCCAGGCCTGGTGATGCGGGCACCTACC
GCTGCCTCGCCAAAGCCTATGTTCGAGGGTCTGGGACCCGGCTTCGTGAAGCAGC
CAGTGCCCGTTCCCGGCCTCTCCCTGTACATGTGCGGGAGGAAGGTGTGGTGCTG
GAGGCTGTGGCATGGCTAGCAGGAGGCACAGTGTACCGCGGGGAGACTGCCTCCC
TGCTGTGCAACATCTCTGTGCGGGGTGGCCCCCCAGGACTGCGGCTGGCCGCCAG
CTGGTGGGTGGAGCGACCAGAGGACGGAGAGCTCAGCTCTGTCCCTGCCCAGCTG
GTGGGTGGCGTAGGCCAGGATGGTGTGGCAGAGCTGGGAGTCCGGCCTGGAGGA
GGCCCTGTCAGCGTAGAGCTGGTGGGGCCCCGAAGCCATCGGCTGAGACTACACA
GCTTGGGGCCCGAGGATGAAGGCGTGTACCACTGTGCCCCCAGCGCCTGGGTGCA
GCATGCCGACTACAGCTGGTACCAGGGGGGCAGTGCCCGCTCAGGGCCTGTTACA
GTCTACCCCTACATGCATGCCCTGGACACCCTATTTGTGCCTCTGCTGGTGGGTAC
AGGGGTGGCCCTAGTCACTGGTGCCACTGTCCTTGGTACCATCACTTGCTGCTTCA
TGAAGAGGCTTCGAAAACGG; Coding sequence of Isopeptide(3) + Isopeptide(1) +
Isopeptide(2) domains-IGSF8 VLM
204:
DYKDHDGDYKDHDIDYKDDDDKSSGLVPRGSHMASMTGGQQMGRGSSGLSGETGQ
SGNTTIEEDSTTHVKFSKRDANGKELAGAMIELRNLSGQTIQSWISDGTVKVFYLMPG
TYQFVETAAPEGYELAAPITFTIDEKGQIWVDSAMVDTLSGLSSEQGQSGDDSATHIK
FSKRDEDGKELAGATMELRDSSGKTISTWISDGQVKDFYLYPGKYTFVETAAPDGYE
VATAITFTVNEQGQVTVNGGGGGSGGGGSGSHMKPLRGAVFSLQKQHPDYPDIYGAI
DQNGTYQNVRTGEDGKLTFKNLSDGKYRLFENSEPAGYKPVQNKPIVAFQIVNGEVR
DVTSIVPQDIPATYEFTNGKHYITNEPIPPKGSPANLKALEAQKQKEQRQAAEELANA
KKLKEQLEKREVLVPEGPLYRVAGTAVSISCNVTGYEGPAQQNFEWFLYRPEAPDTA
LGIVSTKDTQFSYAVFKSRVVAGEVQVQRLQGDAVVLKIARLQAQDAGIYECHTPST
DTRYLGSYSGKVELRVLPDVLQVSAAPPGPRGRQAPTSPPRMTVHEGQELALGCLAR
TSTQKHTHLAVSFGRSVPEAPVGRSTLQEVVGIRSDLAVEAGAPYAERLAAGELRLG
KEGTDRYRMVVGGAQAGDAGTYHCTAAEWIQDPDGSWAQIAEKRAVLAHVDVQTL
SSQLAVTVGPGERRIGPGEPLELLCNVSGALPPAGRHAAYSVGWEMAPAGAPGPGRL
VAQLDTEGVGSLGPGYEGRHIAMEKVASRTYRLRLEAARPGDAGTYRCLAKAYVRG
SGTRLREAASARSRPLPVHVREEGVVLEAVAWLAGGTVYRGETASLLCNISVRGGPP
GLRLAASWWVERPEDGELSSVPAQLVGGVGQDGVAELGVRPGGGPVSVELVGPRSH
RLRLHSLGPEDEGVYHCAPSAWVQHADYSWYQAGSARSGPVTVYPYMHALDTLFVP
LLVGTGVALVTGATVLGTITCCFMKRLRKR; Peptide sequence of Isopeptide(3) +
Isopeptide(1) + Isopeptide(2) domains-IGSF8 VLM
205:
GGTTCCGATTACAAGGATGACGATGACAAGGGTTCCGACAGCGCAACACACATCA
AGTTCTCAAAACGGGATGAGGATGGAAAAGAACTGGCCGGAGCGACAATGGAAC
TGAGAGATTCTTCCGGCAAGACTATCTCCACATGGATTAGTGACGGGCAAGTCAA
AGACTTCTACTTGTACCCCGGTAAGTACACCTTCGTTGAGACTGCCGCTCCTGACG
GGTATGAAGTCGCCACGGCGATCACATTCACTGTGAATGAACAGGGACAGGTGAC
GGTCAATGGAGGCGGTGGCGGCTCTGGCGGAGGAGGCTCATCTTCTGGGTTGGTC
CCCAGAGGCAGCCACATGGCTTCTATGACCGGGGGACAACAAATGGGCAGAGGC
TCAAGCGGCCTTAGCGGTGAAACTGGACAGAGCGGTAATACCACGATTGAGGAG
GACTCCACTACCCATGTCAAATTTTCTAAAAGAGACGCGAACGGAAAGGAATTGG
CTGGCGCGATGATTGAACTGAGGAACCTCTCTGGACAGACCATACAAAGCTGGAT
TTCAGACGGGACCGTTAAGGTTTTCTATCTGATGCCTGGCACCTACCAGTTTGTTG
AAACTGCGGCGCCAGAAGGATATGAGTTGGCGGCTCCCATCACATTCACCATTGA
TGAAAAGGGTCAAATTTGGGTCGACTCAGGCGGTGGCGGTTCAGGTGGGGGCGGT
AGTGGCGGAGGCGGAAGCCGGGAGGTGCTGGTCCCCGAGGGGCCCTTGTACCGC
GTGGCTGGCACAGCTGTCTCCATCTCCTGCAATGTGACCGGCTATGAGGGCCCTGC
CCAGCAGAACTTCGAGTGGTTCCTGTATAGGCCCGAGGCCCCAGATACTGCACTG
GGCATTGTCAGTACCAAGGATACCCAGTTCTCCTATGCTGTCTTCAAGTCCCGAGT
GGTGGCGGGTGAGGTGCAGGTGCAGCGCCTACAAGGTGATGCCGTGGTGCTCAAG
ATTGCCCGCCTGCAGGCCCAGGATGCCGGCATTTATGAGTGCCACACCCCCTCCA
CTGATACCCGCTACCTGGGCAGCTACAGCGGCAAGGTGGAGCTGAGAGTTCTTCC
AGATGTCCTCCAGGTGTCTGCTGCCCCCCCAGGGCCCCGAGGCCGCCAGGCCCCA
ACCTCACCCCCACGCATGACGGTGCATGAGGGGCAGGAGCTGGCACTGGGCTGCC
TGGCGAGGACAAGCACACAGAAGCACACACACCTGGCAGTGTCCTTTGGGCGATC
TGTGCCCGAGGCACCAGTTGGGCGGTCAACTCTGCAGGAAGTGGTGGGAATCCGG
TCAGACTTGGCCGTGGAGGCTGGAGCTCCCTATGCTGAGCGATTGGCTGCAGGGG
AGCTTCGTCTGGGCAAGGAAGGGACCGATCGGTACCGCATGGTAGTAGGGGGTGC
CCAGGCAGGGGACGCAGGCACCTACCACTGCACTGCCGCTGAGTGGATTCAGGAT
CCTGATGGCAGCTGGGCCCAGATTGCAGAGAAAAGGGCCGTCCTGGCCCACGTGG
ATGTGCAGACGCTGTCCAGCCAGCTGGCAGTGACAGTGGGGCCTGGTGAACGTCG
GATCGGCCCAGGGGAGCCCTTGGAACTGCTGTGCAATGTGTCAGGGGCACTTCCC
CCAGCAGGCCGTCATGCTGCATACTCTGTAGGTTGGGAGATGGCACCTGCGGGGG
CACCTGGGCCCGGCCGCCTGGTAGCCCAGCTGGACACAGAGGGTGTGGGCAGCCT
GGGCCCTGGCTATGAGGGCCGACACATTGCCATGGAGAAGGTGGCATCCAGAAC
ATACCGGCTACGGCTAGAGGCTGCCAGGCCTGGTGATGCGGGCACCTACCGCTGC
CTCGCCAAAGCCTATGTTCGAGGGTCTGGGACCCGGCTTCGTGAAGCAGCCAGTG
CCCGTTCCCGGCCTCTCCCTGTACATGTGCGGGAGGAAGGTGTGGTGCTGGAGGC
TGTGGCATGGCTAGCAGGAGGCACAGTGTACCGCGGGGAGACTGCCTCCCTGCTG
TGCAACATCTCTGTGCGGGGTGGCCCCCCAGGACTGCGGCTGGCCGCCAGCTGGT
GGGTGGAGCGACCAGAGGACGGAGAGCTCAGCTCTGTCCCTGCCCAGCTGGTGGG
TGGCGTAGGCCAGGATGGTGTGGCAGAGCTGGGAGTCCGGCCTGGAGGAGGCCC
TGTCAGCGTAGAGCTGGTGGGGCCCCGAAGCCATCGGCTGAGACTACACAGCTTG
GGGCCCGAGGATGAAGGCGTGTACCACTGTGCCCCCAGCGCCTGGGTGCAGCATG
CCGACTACAGCTGGTACCAGGGGGGCAGTGCCCGCTCAGGGCCTGTTACAGTCTA
CCCCTACATGCATGCCCTGGACACCCTATTTGTGCCTCTGCTGGTGGGTACAGGGG
TGGCCCTAGTCACTGGTGCCACTGTCCTTGGTACCATCACTTGCTGCTTCATGAAG
AGGCTTCGAAAACGG; Coding sequence of Isopeptide(1) + Isopeptide(3) IGSF8 VLM
206:
GSDYKDDDDKGSDSATHIKFSKRDEDGKELAGATMELRDSSGKTISTWISDGQVKDF
YLYPGKYTFVETAAPDGYEVATAITFTVNEQGQVTVNGGGGGSGGGGSSSGLVPRGS
HMASMTGGQQMGRGSSGLSGETGQSGNTTIEEDSTTHVKFSKRDANGKELAGAMIE
LRNLSGQTIQSWISDGTVKVFYLMPGTYQFVETAAPEGYELAAPITFTIDEKGQIWVDS
GGGGSGGGGSGGGGSREVLVPEGPLYRVAGTAVSISCNVTGYEGPAQQNFEWFLYRP
EAPDTALGIVSTKDTQFSYAVFKSRVVAGEVQVQRLQGDAVVLKIARLQAQDAGIYE
CHTPSTDTRYLGSYSGKVELRVLPDVLQVSAAPPGPRGRQAPTSPPRMTVHEGQELAL
GCLARTSTQKHTHLAVSFGRSVPEAPVGRSTLQEVVGIRSDLAVEAGAPYAERLAAG
ELRLGKEGTDRYRMVVGGAQAGDAGTYHCTAAEWIQDPDGSWAQIAEKRAVLAHV
DVQTLSSQLAVTVGPGERRIGPGEPLELLCNVSGALPPAGRHAAYSVGWEMAPAGAP
GPGRLVAQLDTEGVGSLGPGYEGRHIAMEKVASRTYRLRLEAARPGDAGTYRCLAK
AYVRGSGTRLREAASARSRPLPVHVREEGVVLEAVAWLAGGTVYRGETASLLCNISV
RGGPPGLRLAASWWVERPEDGELSSVPAQLVGGVGQDGVAELGVRPGGGPVSVELV
GPRSHRLRLHSLGPEDEGVYHCAPSAWVQHADYSWYQAGSARSGPVTVYPYMHAL
DTLFVPLLVGTGVALVTGATVLGTITCCFMKRLRKR; Peptide sequence of Isopeptide(1)
+ Isopeptide(3) IGSF8 VLM
207:
GGTTCCGATTACAAGGATGACGATGACAAGGGTTCCTCTTCTGGGTTGGTCCCCA
GAGGCAGCCACATGGCTTCTATGACCGGGGGACAACAAATGGGCAGAGGCTCAA
GCGGCCTTAGCGGTGAAACTGGACAGAGCGGTAATACCACGATTGAGGAGGACT
CCACTACCCATGTCAAATTTTCTAAAAGAGACGCGAACGGAAAGGAATTGGCTGG
CGCGATGATTGAACTGAGGAACCTCTCTGGACAGACCATACAAAGCTGGATTTCA
GACGGGACCGTTAAGGTTTTCTATCTGATGCCTGGCACCTACCAGTTTGTTGAAAC
TGCGGCGCCAGAAGGATATGAGTTGGCGGCTCCCATCACATTCACCATTGATGAA
AAGGGTCAAATTTGGGTCGACTCAGGCGGTGGCGGCTCTGGCGGAGGAGGCTCAG
ACAGCGCAACACACATCAAGTTCTCAAAACGGGATGAGGATGGAAAAGAACTGG
CCGGAGCGACAATGGAACTGAGAGATTCTTCCGGCAAGACTATCTCCACATGGAT
TAGTGACGGGCAAGTCAAAGACTTCTACTTGTACCCCGGTAAGTACACCTTCGTTG
AGACTGCCGCTCCTGACGGGTATGAAGTCGCCACGGCGATCACATTCACTGTGAA
TGAACAGGGACAGGTGACGGTCAATGGAGGCGGTGGCGGTTCAGGTGGGGGGGG
TAGTGGCGGAGGCGGAAGCCGGGAGGTGCTGGTCCCCGAGGGGCCCTTGTACCGC
GTGGCTGGCACAGCTGTCTCCATCTCCTGCAATGTGACCGGCTATGAGGGCCCTGC
CCAGCAGAACTTCGAGTGGTTCCTGTATAGGCCCGAGGCCCCAGATACTGCACTG
GGCATTGTCAGTACCAAGGATACCCAGTTCTCCTATGCTGTCTTCAAGTCCCGAGT
GGTGGCGGGTGAGGTGCAGGTGCAGCGCCTACAAGGTGATGCCGTGGTGCTCAAG
ATTGCCCGCCTGCAGGCCCAGGATGCCGGCATTTATGAGTGCCACACCCCCTCCA
CTGATACCCGCTACCTGGGCAGCTACAGCGGCAAGGTGGAGCTGAGAGTTCTTCC
AGATGTCCTCCAGGTGTCTGCTGCCCCCCCAGGGCCCCGAGGCCGCCAGGCCCCA
ACCTCACCCCCACGCATGACGGTGCATGAGGGGCAGGAGCTGGCACTGGGCTGCC
TGGCGAGGACAAGCACACAGAAGCACACACACCTGGCAGTGTCCTTTGGGCGATC
TGTGCCCGAGGCACCAGTTGGGCGGTCAACTCTGCAGGAAGTGGTGGGAATCCGG
TCAGACTTGGCCGTGGAGGCTGGAGCTCCCTATGCTGAGCGATTGGCTGCAGGGG
AGCTTCGTCTGGGCAAGGAAGGGACCGATCGGTACCGCATGGTAGTAGGGGGTGC
CCAGGCAGGGGACGCAGGCACCTACCACTGCACTGCCGCTGAGTGGATTCAGGAT
CCTGATGGCAGCTGGGCCCAGATTGCAGAGAAAAGGGCCGTCCTGGCCCACGTGG
ATGTGCAGACGCTGTCCAGCCAGCTGGCAGTGACAGTGGGGCCTGGTGAACGTCG
GATCGGCCCAGGGGAGCCCTTGGAACTGCTGTGCAATGTGTCAGGGGCACTTCCC
CCAGCAGGCCGTCATGCTGCATACTCTGTAGGTTGGGAGATGGCACCTGCGGGGG
CACCTGGGCCCGGCCGCCTGGTAGCCCAGCTGGACACAGAGGGTGTGGGCAGCCT
GGGCCCTGGCTATGAGGGCCGACACATTGCCATGGAGAAGGTGGCATCCAGAAC
ATACCGGCTACGGCTAGAGGCTGCCAGGCCTGGTGATGCGGGCACCTACCGCTGC
CTCGCCAAAGCCTATGTTCGAGGGTCTGGGACCCGGCTTCGTGAAGCAGCCAGTG
CCCGTTCCCGGCCTCTCCCTGTACATGTGCGGGAGGAAGGTGTGGTGCTGGAGGC
TGTGGCATGGCTAGCAGGAGGCACAGTGTACCGCGGGGAGACTGCCTCCCTGCTG
TGCAACATCTCTGTGCGGGGTGGCCCCCCAGGACTGCGGCTGGCCGCCAGCTGGT
GGGTGGAGCGACCAGAGGACGGAGAGCTCAGCTCTGTCCCTGCCCAGCTGGTGGG
TGGCGTAGGCCAGGATGGTGTGGCAGAGCTGGGAGTCCGGCCTGGAGGAGGCCC
TGTCAGCGTAGAGCTGGTGGGGCCCCGAAGCCATCGGCTGAGACTACACAGCTTG
GGGCCCGAGGATGAAGGCGTGTACCACTGTGCCCCCAGCGCCTGGGTGCAGCATG
CCGACTACAGCTGGTACCAGGCGGGCAGTGCCCGCTCAGGGCCTGTTACAGTCTA
CCCCTACATGCATGCCCTGGACACCCTATTTGTGCCTCTGCTGGTGGGTACAGGGG
TGGCCCTAGTCACTGGTGCCACTGTCCTTGGTACCATCACTTGCTGCTTCATGAAG
AGGCTTCGAAAACGG; Coding sequence of Isopeptide(3) + Isopeptide(1) IGSF8 VLM
208:
GSDYKDDDDKGSSSGLVPRGSHMASMTGGQQMGRGSSGLSGETGQSGNTTIEEDSTT
HVKFSKRDANGKELAGAMIELRNLSGQTIQSWISDGTVKVFYLMPGTYQFVETAAPE
GYELAAPITFTIDEKGQIWVDSGGGGSGGGGSDSATHIKFSKRDEDGKELAGATMELR
DSSGKTISTWISDGQVKDFYLYPGKYTFVETAAPDGYEVATAITFTVNEQGQVTVNG
GGGGSGGGGSGGGGSREVLVPEGPLYRVAGTAVSISCNVTGYEGPAQQNFEWFLYRP
EAPDTALGIVSTKDTQFSYAVFKSRVVAGEVQVQRLQGDAVVLKIARLQAQDAGIYE
CHTPSTDTRYLGSYSGKVELRVLPDVLQVSAAPPGPRGRQAPTSPPRMTVHEGQELAL
GCLARTSTQKHTHLAVSFGRSVPEAPVGRSTLQEVVGIRSDLAVEAGAPYAERLAAG
ELRLGKEGTDRYRMVVGGAQAGDAGTYHCTAAEWIQDPDGSWAQIAEKRAVLAHV
DVQTLSSQLAVTVGPGERRIGPGEPLELLCNVSGALPPAGRHAAYSVGWEMAPAGAP
GPGRLVAQLDTEGVGSLGPGYEGRHIAMEKVASRTYRLRLEAARPGDAGTYRCLAK
AYVRGSGTRLREAASARSRPLPVHVREEGVVLEAVAWLAGGTVYRGETASLLCNISV
RGGPPGLRLAASWWVERPEDGELSSVPAQLVGGVGQDGVAELGVRPGGGPVSVELV
GPRSHRLRLHSLGPEDEGVYHCAPSAWVQHADYSWYQAGSARSGPVTVYPYMHAL
DTLFVPLLVGTGVALVTGATVLGTITCCFMKRLRKR; Peptide sequence of Isopeptide(3)
+ Isopeptide(1) IGSF8 VLM
209:
GGTTCCGATTACAAGGATGACGATGACAAGGGTTCCTCTTCTGGGTTGGTCCCCA
GAGGCAGCCACATGGCTTCTATGACCGGGGGACAACAAATGGGCAGAGGCTCAA
GCGGCCTTAGCGGTGAAACTGGACAGAGCGGTAATACCACGATTGAGGAGGACT
CCACTACCCATGTCAAATTTTCTAAAAGAGACGCGAACGGAAAGGAATTGGCTGG
CGCGATGATTGAACTGAGGAACCTCTCTGGACAGACCATACAAAGCTGGATTTCA
GACGGGACCGTTAAGGTTTTCTATCTGATGCCTGGCACCTACCAGTTTGTTGAAAC
TGCGGCGCCAGAAGGATATGAGTTGGCGGCTCCCATCACATTCACCATTGATGAA
AAGGGTCAAATTTGGGTCGACTCAGGCGGTGGCGGCTCTGGCGGAGGAGGCTCAG
ACAGCGCAACACACATCAAGTTCTCAAAACGGGATGAGGATGGAAAAGAACTGG
CCGGAGCGACAATGGAACTGAGAGATTCTTCCGGCAAGACTATCTCCACATGGAT
TAGTGACGGGCAAGTCAAAGACTTCTACTTGTACCCCGGTAAGTACACCTTCGTTG
AGACTGCCGCTCCTGACGGGTATGAAGTCGCCACGGCGATCACATTCACTGTGAA
TGAACAGGGACAGGTGACGGTCAATGGAGGCGGTGGCGGTTCAGGTGGGGGGGG
TAGTGGCGGAGGCGGAAGCTTGGAACTTAATTTGACAGATTCAGAAAATGCCACT
TGCCTTTATGCAAAATGGCAGATGAATTTCACAGTACGCTATGAAACTACAAATA
AAACTTATAAAACTGTAACCATTTCAGACCATGGCACTGTGACATATAATGGAAG
CATTTGTGGGGATGATCAGAATGGTCCCAAAATAGCAGTGCAGTTCGGACCTGGC
TTTTCCTGGATTGCGAATTTTACCAAGGCAGCATCTACTTATTCAATTGACAGCGT
CTCATTTTCCTACAACACTGGTGATAACACAACATTTCCTGATGCTGAAGATAAAG
GAATTCTTACTGTTGATGAACTTTTGGCCATCAGAATTCCATTGAATGACCTTTTT
AGATGCAATAGTTTATCAACTTTGGAAAAGAATGATGTTGTCCAACACTACTGGG
ATGTTCTTGTACAAGCTTTTGTCCAAAATGGCACAGTGAGCACAAATGAGTTCCTG
TGTGATAAAGACAAAACTTCAACAGTGGCACCCACCATACACACCACTGTGCCAT
CTCCTACTACAACACCTACTCCAAAGGAAAAACCAGAAGCTGGAACCTATTCAGT
TAATAATGGCAATGATACTTGTCTGCTGGCTACCATGGGGCTGCAGCTGAACATC
ACTCAGGATAAGGTTGCTTCAGTTATTAACATCAACCCCAATACAACTCACTCCAC
AGGCAGCTGCCGTTCTCACACTGCTCTACTTAGACTCAATAGCAGCACCATTAAGT
ATCTAGACTTTGTCTTTGCTGTGAAAAATGAAAACCGATTTTATCTGAAGGAAGTG
AACATCAGCATGTATTTGGTTAATGGCTCCGTTTTCAGCATTGCAAATAACAATCT
CAGCTACTGGGATGCCCCCCTGGGAAGTTCTTATATGTGCAACAAAGAGCAGACT
GTTTCAGTGTCTGGAGCATTTCAGATAAATACCTTTGATCTAAGGGTTCAGCCTTT
CAATGTGACACAAGGAAAGTATTCTACAGCCCAAGAGTGTTCGCTGGATGATGAC
ACCATTCTAATCCCAATTATAGTTGGTGCTGGTCTTTCAGGCTTGATTATCGTTATA
GTGATTGCTGTGATGCAGAGACTCTTTCCCCGCATCCCTCACATGAAAGACCCCAT
CGGTGACAGCTTCCAAAACGACAAGCTGGTGGTCTGGGAGGCGGGCAAAGCCGG
CCTGGAGGAGTGTCTGGTGACTGAAGTACAGGTCGTGCAGAAAACTTGA; Coding
sequence of Isopeptide(3) + Isopeptide(1) Lamp2-IL3RA VLM (chimeric)
210:
GSDYKDDDDKGSSSGLVPRGSHMASMTGGQQMGRGSSGLSGETGQSGNTTIEEDSTT
HVKFSKRDANGKELAGAMIELRNLSGQTIQSWISDGTVKVFYLMPGTYQFVETAAPE
GYELAAPITFTIDEKGQIWVDSGGGGSGGGGSDSATHIKFSKRDEDGKELAGATMELR
DSSGKTISTWISDGQVKDFYLYPGKYTFVETAAPDGYEVATAITFTVNEQGQVTVNG
GGGGSGGGGSGGGGSLELNLTDSENATCLYAKWQMNFTVRYETTNKTYKTVTISDH
GTVTYNGSICGDDQNGPKIAVQFGPGFSWIANFTKAASTYSIDSVSFSYNTGDNTTFPD
AEDKGILTVDELLAIRIPLNDLERCNSLSTLEKNDVVQHYWDVLVQAFVQNGTVSTNE
FLCDKDKTSTVAPTIHTTVPSPTTTPTPKEKPEAGTYSVNNGNDTCLLATMGLQLNITQ
DKVASVININPNTTHSTGSCRSHTALLRLNSSTIKYLDFVFAVKNENRFYLKEVNISMY
LVNGSVFSIANNNLSYWDAPLGSSYMCNKEQTVSVSGAFQINTFDLRVQPFNVTQGK
YSTAQECSLDDDTILIPIIVGAGLSGLIIVIVIAVMQRLFPRIPHMKDPIGDSFQNDKLVV
WEAGKAGLEECLVTEVQVVQKT; Peptide sequence of Isopeptide(3) + Isopeptide(1)
Lamp2-IL3RA VLM (chimeric)
211:
GGTTCCGATTACAAGGATGACGATGACAAGGGTTCCTCTTCTGGGTTGGTCCCCA
GAGGCAGCCACATGGCTTCTATGACCGGGGGACAACAAATGGGCAGAGGCTCAA
GCGGCCTTAGCGGTGAAACTGGACAGAGCGGTAATACCACGATTGAGGAGGACT
CCACTACCCATGTCAAATTTTCTAAAAGAGACGCGAACGGAAAGGAATTGGCTGG
CGCGATGATTGAACTGAGGAACCTCTCTGGACAGACCATACAAAGCTGGATTTCA
GACGGGACCGTTAAGGTTTTCTATCTGATGCCTGGCACCTACCAGTTTGTTGAAAC
TGCGGCGCCAGAAGGATATGAGTTGGCGGCTCCCATCACATTCACCATTGATGAA
AAGGGTCAAATTTGGGTCGACTCAGGCGGTGGCGGCTCTGGCGGAGGAGGCTCAG
ACAGCGCAACACACATCAAGTTCTCAAAACGGGATGAGGATGGAAAAGAACTGG
CCGGAGCGACAATGGAACTGAGAGATTCTTCCGGCAAGACTATCTCCACATGGAT
TAGTGACGGGCAAGTCAAAGACTTCTACTTGTACCCCGGTAAGTACACCTTCGTTG
AGACTGCCGCTCCTGACGGGTATGAAGTCGCCACGGCGATCACATTCACTGTGAA
TGAACAGGGACAGGTGACGGTCAATGGAGGCGGTGGCGGTTCAGGTGGGGGGGG
TAGTGGCGGAGGCGGAAGCTTGGAACTTAATTTGACAGATTCAGAAAATGCCACT
TGCCTTTATGCAAAATGGCAGATGAATTTCACAGTACGCTATGAAACTACAAATA
AAACTTATAAAACTGTAACCATTTCAGACCATGGCACTGTGACATATAATGGAAG
CATTTGTGGGGATGATCAGAATGGTCCCAAAATAGCAGTGCAGTTCGGACCTGGC
TTTTCCTGGATTGCGAATTTTACCAAGGCAGCATCTACTTATTCAATTGACAGCGT
CTCATTTTCCTACAACACTGGTGATAACACAACATTTCCTGATGCTGAAGATAAAG
GAATTCTTACTGTTGATGAACTTTTGGCCATCAGAATTCCATTGAATGACCTTTTT
AGATGCAATAGTTTATCAACTTTGGAAAAGAATGATGTTGTCCAACACTACTGGG
ATGTTCTTGTACAAGCTTTTGTCCAAAATGGCACAGTGAGCACAAATGAGTTCCTG
TGTGATAAAGACAAAACTTCAACAGTGGCACCCACCATACACACCACTGTGCCAT
CTCCTACTACAACACCTACTCCAAAGGAAAAACCAGAAGCTGGAACCTATTCAGT
TAATAATGGCAATGATACTTGTCTGCTGGCTACCATGGGGCTGCAGCTGAACATC
ACTCAGGATAAGGTTGCTTCAGTTATTAACATCAACCCCAATACAACTCACTCCAC
AGGCAGCTGCCGTTCTCACACTGCTCTACTTAGACTCAATAGCAGCACCATTAAGT
ATCTAGACTTTGTCTTTGCTGTGAAAAATGAAAACCGATTTTATCTGAAGGAAGTG
AACATCAGCATGTATTTGGTTAATGGCTCCGTTTTCAGCATTGCAAATAACAATCT
CAGCTACTGGGATGCCCCCCTGGGAAGTTCTTATATGTGCAACAAAGAGCAGACT
GTTTCAGTGTCTGGAGCATTTCAGATAAATACCTTTGATCTAAGGGTTCAGCCTTT
CAATGTGACACAAGGAAAGTATTCTACAGCCCAAGAGTGTTCGCTGGATGATGAC
ACCATTCTAATCCCAATTATAGTTGGTGCTGGTCTTTCAGGCTTGATTATCGTTATA
GTGATTGCTCGCCTCTCCCGCAAGGGCCACATGTACCCCGTGCGTAATTACTCCCC
CACCGAGATGGTCTGCATCTCATCCCTGTTGCCTGATGGGGGTGAGGGGCCCTCTG
CCACAGCCAATGGGGGCCTGTCCAAGGCCAAGAGCCCGGGCCTGACGCCAGAGC
CCAGGGAGGACCGTGAGGGGGATGACCTCACCCTGCACAGCTTCCTCCCTTAG;
Coding sequence of Isopeptide(3) + Isopeptide(1) Lamp2-SELPL VLM (chimeric)
212:
GSDYKDDDDKGSSSGLVPRGSHMASMTGGQQMGRGSSGLSGETGQSGNTTIEEDSTT
HVKFSKRDANGKELAGAMIELRNLSGQTIQSWISDGTVKVFYLMPGTYQFVETAAPE
GYELAAPITFTIDEKGQIWVDSGGGGSGGGGSDSATHIKFSKRDEDGKELAGATMELR
DSSGKTISTWISDGQVKDFYLYPGKYTFVETAAPDGYEVATAITFTVNEQGQVTVNG
GGGGSGGGGSGGGGSLELNLTDSENATCLYAKWQMNFTVRYETTNKTYKTVTISDH
GTVTYNGSICGDDQNGPKIAVQFGPGFSWIANFTKAASTYSIDSVSFSYNTGDNTTFPD
AEDKGILTVDELLAIRIPLNDLERCNSLSTLEKNDVVQHYWDVLVQAFVQNGTVSTNE
FLCDKDKTSTVAPTIHTTVPSPTTTPTPKEKPEAGTYSVNNGNDTCLLATMGLQLNITQ
DKVASVININPNTTHSTGSCRSHTALLRLNSSTIKYLDFVFAVKNENRFYLKEVNISMY
LVNGSVFSIANNNLSYWDAPLGSSYMCNKEQTVSVSGAFQINTFDLRVQPFNVTQGK
YSTAQECSLDDDTILIPIIVGAGLSGLIIVIVIARLSRKGHMYPVRNYSPTEMVCISSLLP
DGGEGPSATANGGLSKAKSPGLTPEPREDREGDDLTLHSFLP; Peptide sequence of
Isopeptide(3) + Isopeptide(1) Lamp2-SELPL VLM (chimeric)
213:
GGTTCCGATTACAAGGATGACGATGACAAGGGTTCCTCTTCTGGGTTGGTCCCCA
GAGGCAGCCACATGGCTTCTATGACCGGGGGACAACAAATGGGCAGAGGCTCAA
GCGGCCTTAGCGGTGAAACTGGACAGAGCGGTAATACCACGATTGAGGAGGACT
CCACTACCCATGTCAAATTTTCTAAAAGAGACGCGAACGGAAAGGAATTGGCTGG
CGCGATGATTGAACTGAGGAACCTCTCTGGACAGACCATACAAAGCTGGATTTCA
GACGGGACCGTTAAGGTTTTCTATCTGATGCCTGGCACCTACCAGTTTGTTGAAAC
TGCGGCGCCAGAAGGATATGAGTTGGCGGCTCCCATCACATTCACCATTGATGAA
AAGGGTCAAATTTGGGTCGACTCAGGCGGTGGCGGCTCTGGCGGAGGAGGCTCAG
ACAGCGCAACACACATCAAGTTCTCAAAACGGGATGAGGATGGAAAAGAACTGG
CCGGAGCGACAATGGAACTGAGAGATTCTTCCGGCAAGACTATCTCCACATGGAT
TAGTGACGGGCAAGTCAAAGACTTCTACTTGTACCCCGGTAAGTACACCTTCGTTG
AGACTGCCGCTCCTGACGGGTATGAAGTCGCCACGGCGATCACATTCACTGTGAA
TGAACAGGGACAGGTGACGGTCAATGGAGGCGGTGGCGGTTCAGGTGGGGGGGG
TAGTGGCGGAGGCGGAAGCTTGGAACTTAATTTGACAGATTCAGAAAATGCCACT
TGCCTTTATGCAAAATGGCAGATGAATTTCACAGTACGCTATGAAACTACAAATA
AAACTTATAAAACTGTAACCATTICAGACCATGGCACTGTGACATATAATGGAAG
CATTTGTGGGGATGATCAGAATGGTCCCAAAATAGCAGTGCAGTTCGGACCTGGC
TTTTCCTGGATTGCGAATTTTACCAAGGCAGCATCTACTTATTCAATTGACAGCGT
CTCATTTTCCTACAACACTGGTGATAACACAACATTTCCTGATGCTGAAGATAAAG
GAATTCTTACTGTTGATGAACTTTTGGCCATCAGAATTCCATTGAATGACCTTTTT
AGATGCAATAGTTTATCAACTTTGGAAAAGAATGATGTTGTCCAACACTACTGGG
ATGTTCTTGTACAAGCTTTTGTCCAAAATGGCACAGTGAGCACAAATGAGTTCCTG
TGTGATAAAGACAAAACTTCAACAGTGGCACCCACCATACACACCACTGTGCCAT
CTCCTACTACAACACCTACTCCAAAGGAAAAACCAGAAGCTGGAACCTATTCAGT
TAATAATGGCAATGATACTTGTCTGCTGGCTACCATGGGGCTGCAGCTGAACATC
ACTCAGGATAAGGTTGCTTCAGTTATTAACATCAACCCCAATACAACTCACTCCAC
AGGCAGCTGCCGTTCTCACACTGCTCTACTTAGACTCAATAGCAGCACCATTAAGT
ATCTAGACTTTGTCTTTGCTGTGAAAAATGAAAACCGATTTTATCTGAAGGAAGTG
AACATCAGCATGTATTTGGTTAATGGCTCCGTTTTCAGCATTGCAAATAACAATCT
CAGCTACTGGGATGCCCCCCTGGGAAGTTCTTATATGTGCAACAAAGAGCAGACT
GTTTCAGTGTCTGGAGCATTTCAGATAAATACCTTTGATCTAAGGGTTCAGCCTTT
CAATGTGACACAAGGAAAGTATTCTACAGCCCAAGAGTGTTCGCTGGATGATGAC
ACCATTCTAATCCCAATTATAGTTGGTGCTGGTCTTTCAGGCTTGATTATCGTTATA
GTGATTGCTAGCTCCCACTGGTGTTGTAAGAAGGAGGTTCAGGAGACACGGCGCG
AGCGCCGCAGGCTCATGTCGATGGAGATGGACTAG; Coding sequence of
Isopeptide(3) + Isopeptide(1) Lamp2-PTGFRN VLM (chimeric)
214:
GSDYKDDDDKGSSSGLVPRGSHMASMTGGQQMGRGSSGLSGETGQSGNTTIEEDSTT
HVKFSKRDANGKELAGAMIELRNLSGQTIQSWISDGTVKVFYLMPGTYQFVETAAPE
GYELAAPITFTIDEKGQIWVDSGGGGSGGGGSDSATHIKFSKRDEDGKELAGATMELR
DSSGKTISTWISDGQVKDFYLYPGKYTFVETAAPDGYEVATAITFTVNEQGQVTVNG
GGGGSGGGGSGGGGSLELNLTDSENATCLYAKWQMNFTVRYETTNKTYKTVTISDH
GTVTYNGSICGDDQNGPKIAVQFGPGFSWIANFTKAASTYSIDSVSFSYNTGDNTTFPD
AEDKGILTVDELLAIRIPLNDLFRCNSLSTLEKNDVVQHYWDVLVQAFVQNGTVSTNE
FLCDKDKTSTVAPTIHTTVPSPTTTPTPKEKPEAGTYSVNNGNDTCLLATMGLQLNITQ
DKVASVININPNTTHSTGSCRSHTALLRLNSSTIKYLDFVFAVKNENRFYLKEVNISMY
LVNGSVFSIANNNLSYWDAPLGSSYMCNKEQTVSVSGAFQINTFDLRVQPFNVTQGK
YSTAQECSLDDDTILIPIIVGAGLSGLIIVIVIASSHWCCKKEVQETRRERRRLMSMEMD;
Peptide sequence of Isopeptide(3) + Isopeptide(1) Lamp2-PTGFRN VLM (chimerie)

TABLE 8
Fusion Protein Comprising Isopeptide Tag and VLM

SEQ ID NO: Sequence; Source
215:
GACTACAAAGACCACGACGGGGATTATAAAGATCATGACATCGATTACAAGGAT
GACGATGATAAGGGCTCTGGCGCACACATCGTTATGGTCGACGCATACAAACCAA
CAAAGGGATCCCCCGCCAACCTGAAGGCCCTGGAGGCCCAGAAGCAGAAGGAGC
AGAGACAGGCCGCCGAGGAGCTGGCCAACGCCAAGAAGCTGAAGGAGCAGCTGG
AGAAGCGGGAGGTGCTGGTCCCCGAGGGGCCCTTGTACCGCGTGGCTGGCACAGC
TGTCTCCATCTCCTGCAATGTGACCGGCTATGAGGGCCCTGCCCAGCAGAACTTCG
AGTGGTTCCTGTATAGGCCCGAGGCCCCAGATACTGCACTGGGCATTGTCAGTAC
CAAGGATACCCAGTTCTCCTATGCTGTCTTCAAGTCCCGAGTGGTGGCGGGTGAG
GTGCAGGTGCAGCGCCTACAAGGTGATGCCGTGGTGCTCAAGATTGCCCGCCTGC
AGGCCCAGGATGCCGGCATTTATGAGTGCCACACCCCCTCCACTGATACCCGCTA
CCTGGGCAGCTACAGCGGCAAGGTGGAGCTGAGAGTTCTTCCAGATGTCCTCCAG
GTGTCTGCTGCCCCCCCAGGGCCCCGAGGCCGCCAGGCCCCAACCTCACCCCCAC
GCATGACGGTGCATGAGGGGCAGGAGCTGGCACTGGGCTGCCTGGCGAGGACAA
GCACACAGAAGCACACACACCTGGCAGTGTCCTTTGGGCGATCTGTGCCCGAGGC
ACCAGTTGGGCGGTCAACTCTGCAGGAAGTGGTGGGAATCCGGTCAGACTTGGCC
GTGGAGGCTGGAGCTCCCTATGCTGAGCGATTGGCTGCAGGGGAGCTTCGTCTGG
GCAAGGAAGGGACCGATCGGTACCGCATGGTAGTAGGGGGTGCCCAGGCAGGGG
ACGCAGGCACCTACCACTGCACTGCCGCTGAGTGGATTCAGGATCCTGATGGCAG
CTGGGCCCAGATTGCAGAGAAAAGGGCCGTCCTGGCCCACGTGGATGTGCAGACG
CTGTCCAGCCAGCTGGCAGTGACAGTGGGGCCTGGTGAACGTCGGATCGGCCCAG
GGGAGCCCTTGGAACTGCTGTGCAATGTGTCAGGGGCACTTCCCCCAGCAGGCCG
TCATGCTGCATACTCTGTAGGTTGGGAGATGGCACCTGCGGGGGCACCTGGGCCC
GGCCGCCTGGTAGCCCAGCTGGACACAGAGGGTGTGGGCAGCCTGGGCCCTGGCT
ATGAGGGCCGACACATTGCCATGGAGAAGGTGGCATCCAGAACATACCGGCTAC
GGCTAGAGGCTGCCAGGCCTGGTGATGCGGGCACCTACCGCTGCCTCGCCAAAGC
CTATGTTCGAGGGTCTGGGACCCGGCTTCGTGAAGCAGCCAGTGCCCGTTCCCGG
CCTCTCCCTGTACATGTGCGGGAGGAAGGTGTGGTGCTGGAGGCTGTGGCATGGC
TAGCAGGAGGCACAGTGTACCGCGGGGAGACTGCCTCCCTGCTGTGCAACATCTC
TGTGCGGGGGGCCCCCCAGGACTGCGGCTGGCCGCCAGCTGGTGGGTGGAGCGA
CCAGAGGACGGAGAGCTCAGCTCTGTCCCTGCCCAGCTGGTGGGTGGCGTAGGCC
AGGATGGTGTGGCAGAGCTGGGAGTCCGGCCTGGAGGAGGCCCTGTCAGCGTAG
AGCTGGTGGGGCCCCGAAGCCATCGGCTGAGACTACACAGCTTGGGGCCCGAGG
ATGAAGGCGTGTACCACTGTGCCCCCAGCGCCTGGGTGCAGCATGCCGACTACAG
CTGGTACCAGGCGGGCAGTGCCCGCTCAGGGCCTGTTACAGTCTACCCCTACATG
CATGCCCTGGACACCCTATTTGTGCCTCTGCTGGTGGGTACAGGGGTGGCCCTAGT
CACTGGTGCCACTGTCCTTGGTACCATCACTTGCTGCTTCATGAAGAGGCTTCGAA
AACGG; Coding sequence of Isopeptide(1) tag-IGSF8 VLM.
216;
DYKDHDGDYKDHDIDYKDDDDKGSGAHIVMVDAYKPTKGSPANLKALEAQKQKEQ
RQAAEELANAKKLKEQLEKREVLVPEGPLYRVAGTAVSISCNVTGYEGPAQQNFEWF
LYRPEAPDTALGIVSTKDTQFSYAVFKSRVVAGEVQVQRLQGDAVVLKIARLQAQDA
GIYECHTPSTDTRYLGSYSGKVELRVLPDVLQVSAAPPGPRGRQAPTSPPRMTVHEGQ
ELALGCLARTSTQKHTHLAVSFGRSVPEAPVGRSTLQEVVGIRSDLAVEAGAPYAERL
AAGELRLGKEGTDRYRMVVGGAQAGDAGTYHCTAAEWIQDPDGSWAQIAEKRAVL
AHVDVQTLSSQLAVTVGPGERRIGPGEPLELLCNVSGALPPAGRHAAYSVGWEMAPA
GAPGPGRLVAQLDTEGVGSLGPGYEGRHIAMEKVASRTYRLRLEAARPGDAGTYRC
LAKAYVRGSGTRLREAASARSRPLPVHVREEGVVLEAVAWLAGGTVYRGETASLLC
NISVRGGPPGLRLAASWWVERPEDGELSSVPAQLVGGVGQDGVAELGVRPGGGPVS
VELVGPRSHRLRLHSLGPEDEGVYHCAPSAWVQHADYSWYQAGSARSGPVTVYPY
MHALDTLFVPLLVGTGVALVTGATVLGTITCCFMKRLRKR; Peptide sequence of
Isopeptide(1) tag-IGSF8 VLM
217:
GACTACAAAGACCACGACGGGGATTATAAAGATCATGACATCGATTACAAGGAT
GACGATGATAAGGGCTCTGGCAAGTTAGGCGATATCGAATTCATTAAAGTCAATA
AGGGATCCCCCGCCAACCTGAAGGCCCTGGAGGCCCAGAAGCAGAAGGAGCAGA
GACAGGCCGCCGAGGAGCTGGCCAACGCCAAGAAGCTGAAGGAGCAGCTGGAGA
AGCGGGAGGTGCTGGTCCCCGAGGGGCCCTTGTACCGCGTGGCTGGCACAGCTGT
CTCCATCTCCTGCAATGTGACCGGCTATGAGGGCCCTGCCCAGCAGAACTTCGAG
TGGTTCCTGTATAGGCCCGAGGCCCCAGATACTGCACTGGGCATTGTCAGTACCA
AGGATACCCAGTTCTCCTATGCTGTCTTCAAGTCCCGAGTGGTGGCGGGTGAGGT
GCAGGTGCAGCGCCTACAAGGTGATGCCGTGGTGCTCAAGATTGCCCGCCTGCAG
GCCCAGGATGCCGGCATTTATGAGTGCCACACCCCCTCCACTGATACCCGCTACCT
GGGCAGCTACAGCGGCAAGGTGGAGCTGAGAGTTCTTCCAGATGTCCTCCAGGTG
TCTGCTGCCCCCCCAGGGCCCCGAGGCCGCCAGGCCCCAACCTCACCCCCACGCA
TGACGGTGCATGAGGGGCAGGAGCTGGCACTGGGCTGCCTGGCGAGGACAAGCA
CACAGAAGCACACACACCTGGCAGTGTCCTTTGGGCGATCTGTGCCCGAGGCACC
AGTTGGGCGGTCAACTCTGCAGGAAGTGGTGGGAATCCGGTCAGACTTGGCCGTG
GAGGCTGGAGCTCCCTATGCTGAGCGATTGGCTGCAGGGGAGCTTCGTCTGGGCA
AGGAAGGGACCGATCGGTACCGCATGGTAGTAGGGGGTGCCCAGGCAGGGGACG
CAGGCACCTACCACTGCACTGCCGCTGAGTGGATTCAGGATCCTGATGGCAGCTG
GGCCCAGATTGCAGAGAAAAGGGCCGTCCTGGCCCACGTGGATGTGCAGACGCTG
TCCAGCCAGCTGGCAGTGACAGTGGGGCCTGGTGAACGTCGGATCGGCCCAGGGG
AGCCCTTGGAACTGCTGTGCAATGTGTCAGGGGCACTTCCCCCAGCAGGCCGTCA
TGCTGCATACTCTGTAGGTTGGGAGATGGCACCTGCGGGGGCACCTGGGCCCGGC
CGCCTGGTAGCCCAGCTGGACACAGAGGGTGTGGGCAGCCTGGGCCCTGGCTATG
AGGGCCGACACATTGCCATGGAGAAGGTGGCATCCAGAACATACCGGCTACGGCT
AGAGGCTGCCAGGCCTGGTGATGCGGGCACCTACCGCTGCCTCGCCAAAGCCTAT
GTTCGAGGGTCTGGGACCCGGCTTCGTGAAGCAGCCAGTGCCCGTTCCCGGCCTC
TCCCTGTACATGTGCGGGAGGAAGGTGTGGTGCTGGAGGCTGTGGCATGGCTAGC
AGGAGGCACAGTGTACCGCGGGGAGACTGCCTCCCTGCTGTGCAACATCTCTGTG
CGGGGTGGCCCCCCAGGACTGCGGCTGGCCGCCAGCTGGTGGGTGGAGCGACCA
GAGGACGGAGAGCTCAGCTCTGTCCCTGCCCAGCTGGTGGGTGGCGTAGGCCAGG
ATGGTGTGGCAGAGCTGGGAGTCCGGCCTGGAGGAGGCCCTGTCAGCGTAGAGCT
GGTGGGGCCCCGAAGCCATCGGCTGAGACTACACAGCTTGGGGCCCGAGGATGA
AGGCGTGTACCACTGTGCCCCCAGCGCCTGGGTGCAGCATGCCGACTACAGCTGG
TACCAGGCGGGCAGTGCCCGCTCAGGGCCTGTTACAGTCTACCCCTACATGCATG
CCCTGGACACCCTATTTGTGCCTCTGCTGGTGGGTACAGGGGTGGCCCTAGTCACT
GGTGCCACTGTCCTTGGTACCATCACTTGCTGCTTCATGAAGAGGCTTCGAAAACG
G; Coding sequence of Isopeptide(2) tag-IGSF8 VLM
218:
DYKDHDGDYKDHDIDYKDDDDKGSGKIGDIEFIKVNKGSPANLKALEAQKQKEQRQ
AAEELANAKKLKEQLEKREVLVPEGPLYRVAGTAVSISCNVTGYEGPAQQNFEWFLY
RPEAPDTALGIVSTKDTQFSYAVFKSRVVAGEVQVQRLQGDAVVLKIARLQAQDAGI
YECHTPSTDTRYLGSYSGKVELRVLPDVLQVSAAPPGPRGRQAPTSPPRMTVHEGQEL
ALGCLARTSTQKHTHLAVSFGRSVPEAPVGRSTLQEVVGIRSDLAVEAGAPYAERLA
AGELRLGKEGTDRYRMVVGGAQAGDAGTYHCTAAEWIQDPDGSWAQIAEKRAVLA
HVDVQTLSSQLAVTVGPGERRIGPGEPLELLCNVSGALPPAGRHAAYSVGWEMAPAG
APGPGRLVAQLDTEGVGSLGPGYEGRHIAMEKVASRTYRLRLEAARPGDAGTYRCL
AKAYVRGSGTRLREAASARSRPLPVHVREEGVVLEAVAWLAGGTVYRGETASLLCNI
SVRGGPPGLRLAASWWVERPEDGELSSVPAQLVGGVGQDGVAELGVRPGGGPVSVE
LVGPRSHRLRLHSLGPEDEGVYHCAPSAWVQHADYSWYQAGSARSGPVTVYPYMH
ALDTLFVPLLVGTGVALVTGATVLGTITCCFMKRLRKR; Peptide sequence of
Isopeptide(2) tag-IGSF8 VLM
219:
GACTACAAAGACCACGACGGGGATTATAAAGATCATGACATCGATTACAAGGAT
GACGATGATAAGGGCTCTGGCGCACACATCGTTATGGTCGACGCATACAAACCAA
CAAAGGGCGGTGGCGGCTCTGGCGGAGGAGGCTCAAAGTTAGGCGATATCGAAT
TCATTAAAGTCAATAAGGGATCCCCCGCCAACCTGAAGGCCCTGGAGGCCCAGAA
GCAGAAGGAGCAGAGACAGGCCGCCGAGGAGCTGGCCAACGCCAAGAAGCTGAA
GGAGCAGCTGGAGAAGCGGGAGGTGCTGGTCCCCGAGGGGCCCTTGTACCGCGT
GGCTGGCACAGCTGTCTCCATCTCCTGCAATGTGACCGGCTATGAGGGCCCTGCCC
AGCAGAACTTCGAGTGGTTCCTGTATAGGCCCGAGGCCCCAGATACTGCACTGGG
CATTGTCAGTACCAAGGATACCCAGTTCTCCTATGCTGTCTTCAAGTCCCGAGTGG
TGGCGGGTGAGGTGCAGGTGCAGCGCCTACAAGGTGATGCCGTGGTGCTCAAGAT
TGCCCGCCTGCAGGCCCAGGATGCCGGCATTTATGAGTGCCACACCCCCTCCACT
GATACCCGCTACCTGGGCAGCTACAGCGGCAAGGTGGAGCTGAGAGTTCTTCCAG
ATGTCCTCCAGGTGTCTGCTGCCCCCCCAGGGCCCCGAGGCCGCCAGGCCCCAAC
CTCACCCCCACGCATGACGGTGCATGAGGGGCAGGAGCTGGCACTGGGCTGCCTG
GCGAGGACAAGCACACAGAAGCACACACACCTGGCAGTGTCCTTTGGGCGATCTG
TGCCCGAGGCACCAGTTGGGCGGTCAACTCTGCAGGAAGTGGTGGGAATCCGGTC
AGACTTGGCCGTGGAGGCTGGAGCTCCCTATGCTGAGCGATTGGCTGCAGGGGAG
CTTCGTCTGGGCAAGGAAGGGACCGATCGGTACCGCATGGTAGTAGGGGGTGCCC
AGGCAGGGGACGCAGGCACCTACCACTGCACTGCCGCTGAGTGGATTCAGGATCC
TGATGGCAGCTGGGCCCAGATTGCAGAGAAAAGGGCCGTCCTGGCCCACGTGGAT
GTGCAGACGCTGTCCAGCCAGCTGGCAGTGACAGTGGGGCCTGGTGAACGTCGGA
TCGGCCCAGGGGAGCCCTTGGAACTGCTGTGCAATGTGTCAGGGGCACTTCCCCC
AGCAGGCCGTCATGCTGCATACTCTGTAGGTTGGGAGATGGCACCTGCGGGGGCA
CCTGGGCCCGGCCGCCTGGTAGCCCAGCTGGACACAGAGGGTGTGGGCAGCCTGG
GCCCTGGCTATGAGGGCCGACACATTGCCATGGAGAAGGTGGCATCCAGAACATA
CCGGCTACGGCTAGAGGCTGCCAGGCCTGGTGATGCGGGCACCTACCGCTGCCTC
GCCAAAGCCTATGTTCGAGGGTCTGGGACCCGGCTTCGTGAAGCAGCCAGTGCCC
GTTCCCGGCCTCTCCCTGTACATGTGCGGGAGGAAGGTGTGGTGCTGGAGGCTGT
GGCATGGCTAGCAGGAGGCACAGTGTACCGCGGGGAGACTGCCTCCCTGCTGTGC
AACATCTCTGTGCGGGGTGGCCCCCCAGGACTGCGGCTGGCCGCCAGCTGGTGGG
TGGAGCGACCAGAGGACGGAGAGCTCAGCTCTGTCCCTGCCCAGCTGGTGGGTGG
CGTAGGCCAGGATGGTGTGGCAGAGCTGGGAGTCCGGCCTGGAGGAGGCCCTGTC
AGCGTAGAGCTGGTGGGGCCCCGAAGCCATCGGCTGAGACTACACAGCTTGGGGC
CCGAGGATGAAGGCGTGTACCACTGTGCCCCCAGCGCCTGGGTGCAGCATGCCGA
CTACAGCTGGTACCAGGCGGGCAGTGCCCGCTCAGGGCCTGTTACAGTCTACCCC
TACATGCATGCCCTGGACACCCTATTTGTGCCTCTGCTGGTGGGTACAGGGGTGGC
CCTAGTCACTGGTGCCACTGTCCTTGGTACCATCACTTGCTGCTTCATGAAGAGGC
TTCGAAAACGG; Coding sequence of Isopeptide(1) tag + Isopeptide(2)
tag-IGSF8 VLM
220:
DYKDHDGDYKDHDIDYKDDDDKGSGAHIVMVDAYKPTKGGGGSGGGGSKLGDIEFI
KVNKGSPANLKALEAQKQKEQRQAAEELANAKKLKEQLEKREVLVPEGPLYRVAGT
AVSISCNVTGYEGPAQQNFEWFLYRPEAPDTALGIVSTKDTQFSYAVFKSRVVAGEV
QVQRLQGDAVVLKIARLQAQDAGIYECHTPSTDTRYLGSYSGKVELRVLPDVLQVSA
APPGPRGRQAPTSPPRMTVHEGQELALGCLARTSTQKHTHLAVSFGRSVPEAPVGRST
LQEVVGIRSDLAVEAGAPYAERLAAGELRLGKEGTDRYRMVVGGAQAGDAGTYHC
TAAEWIQDPDGSWAQIAEKRAVLAHVDVQTLSSQLAVTVGPGERRIGPGEPLELLCN
VSGALPPAGRHAAYSVGWEMAPAGAPGPGRLVAQLDTEGVGSLGPGYEGRHIAMEK
VASRTYRLRLEAARPGDAGTYRCLAKAYVRGSGTRLREAASARSRPLPVHVREEGVV
LEAVAWLAGGTVYRGETASLLCNISVRGGPPGLRLAASWWVERPEDGELSSVPAQLV
GGVGQDGVAELGVRPGGGPVSVELVGPRSHRLRLHSLGPEDEGVYHCAPSAWVQHA
DYSWYQAGSARSGPVTVYPYMHALDTLFVPLLVGTGVALVTGATVLGTITCCFMKR
LRKR; Peptide sequence of Isopeptide(1) tag+Isopeptide(2) tag-IGSF8 VLM
221:
GACTACAAAGACCACGACGGGGATTATAAAGATCATGACATCGATTACAAGGAT
GACGATGATAAGGATCCGATCGTAATGATAGACAACGACAAACCAATCACCGCC
ATGGTTGATACCTTATCAGGTTTATCAAGTGAGCAAGGTCAGTCCGGTGATGCAC
ACATCGTTATGGTCGACGCATACAAACCAACAAAGGGCGGTGGCGGCTCTGGCGG
AGGAGGCTCAAAGTTAGGCGATATCGAATTCATTAAAGTCAATAAGGGATCCCCC
GCCAACCTGAAGGCCCTGGAGGCCCAGAAGCAGAAGGAGCAGAGACAGGCCGCC
GAGGAGCTGGCCAACGCCAAGAAGCTGAAGGAGCAGCTGGAGAAGCGGGAGGTG
CTGGTCCCCGAGGGGCCCTTGTACCGCGTGGCTGGCACAGCTGTCTCCATCTCCTG
CAATGTGACCGGCTATGAGGGCCCTGCCCAGCAGAACTTCGAGTGGTTCCTGTAT
AGGCCCGAGGCCCCAGATACTGCACTGGGCATTGTCAGTACCAAGGATACCCAGT
TCTCCTATGCTGTCTTCAAGTCCCGAGTGGTGGCGGGTGAGGTGCAGGTGCAGCG
CCTACAAGGTGATGCCGTGGTGCTCAAGATTGCCCGCCTGCAGGCCCAGGATGCC
GGCATTTATGAGTGCCACACCCCCTCCACTGATACCCGCTACCTGGGCAGCTACA
GCGGCAAGGTGGAGCTGAGAGTTCTTCCAGATGTCCTCCAGGTGTCTGCTGCCCC
CCCAGGGCCCCGAGGCCGCCAGGCCCCAACCTCACCCCCACGCATGACGGTGCAT
GAGGGGCAGGAGCTGGCACTGGGCTGCCTGGCGAGGACAAGCACACAGAAGCAC
ACACACCTGGCAGTGTCCTTTGGGCGATCTGTGCCCGAGGCACCAGTTGGGCGGT
CAACTCTGCAGGAAGTGGTGGGAATCCGGTCAGACTTGGCCGTGGAGGCTGGAGC
TCCCTATGCTGAGCGATTGGCTGCAGGGGAGCTTCGTCTGGGCAAGGAAGGGACC
GATCGGTACCGCATGGTAGTAGGGGGTGCCCAGGCAGGGGACGCAGGCACCTAC
CACTGCACTGCCGCTGAGTGGATTCAGGATCCTGATGGCAGCTGGGCCCAGATTG
CAGAGAAAAGGGCCGTCCTGGCCCACGTGGATGTGCAGACGCTGTCCAGCCAGCT
GGCAGTGACAGTGGGGCCTGGTGAACGTCGGATCGGCCCAGGGGAGCCCTTGGA
ACTGCTGTGCAATGTGTCAGGGGCACTTCCCCCAGCAGGCCGTCATGCTGCATACT
CTGTAGGTTGGGAGATGGCACCTGCGGGGGCACCTGGGCCCGGCCGCCTGGTAGC
CCAGCTGGACACAGAGGGTGTGGGCAGCCTGGGCCCTGGCTATGAGGGCCGACA
CATTGCCATGGAGAAGGTGGCATCCAGAACATACCGGCTACGGCTAGAGGCTGCC
AGGCCTGGTGATGCGGGCACCTACCGCTGCCTCGCCAAAGCCTATGTTCGAGGGT
CTGGGACCCGGCTTCGTGAAGCAGCCAGTGCCCGTTCCCGGCCTCTCCCTGTACAT
GTGCGGGAGGAAGGTGTGGTGCTGGAGGCTGTGGCATGGCTAGCAGGAGGCACA
GTGTACCGCGGGGAGACTGCCTCCCTGCTGTGCAACATCTCTGTGCGGGGTGGCC
CCCCAGGACTGCGGCTGGCCGCCAGCTGGTGGGTGGAGCGACCAGAGGACGGAG
AGCTCAGCTCTGTCCCTGCCCAGCTGGTGGGTGGCGTAGGCCAGGATGGTGTGGC
AGAGCTGGGAGTCCGGCCTGGAGGAGGCCCTGTCAGCGTAGAGCTGGTGGGGCC
CCGAAGCCATCGGCTGAGACTACACAGCTTGGGGCCCGAGGATGAAGGCGTGTAC
CACTGTGCCCCCAGCGCCTGGGTGCAGCATGCCGACTACAGCTGGTACCAGGCGG
GCAGTGCCCGCTCAGGGCCTGTTACAGTCTACCCCTACATGCATGCCCTGGACACC
CTATTTGTGCCTCTGCTGGTGGGTACAGGGGTGGCCCTAGTCACTGGTGCCACTGT
CCTTGGTACCATCACTTGCTGCTTCATGAAGAGGCTTCGAAAACGG; Coding
sequence of Isopeptide(1) tag + Isopeptide(2) tag + Isopeptide(3) tag-
IGSF8 VLM
222:
DYKDHDGDYKDHDIDYKDDDDKDPIVMIDNDKPITAMVDTLSGLSSEQGQSGDAHIV
MVDAYKPTKGGGGSGGGGSKLGDIEFIKVNKGSPANLKALEAQKQKEQRQAAEELA
NAKKLKEQLEKREVLVPEGPLYRVAGTAVSISCNVTGYEGPAQQNFEWFLYRPEAPD
TALGIVSTKDTQFSYAVFKSRVVAGEVQVQRLQGDAVVLKIARLQAQDAGIYECHTP
STDTRYLGSYSGKVELRVLPDVLQVSAAPPGPRGRQAPTSPPRMTVHEGQELALGCL
ARTSTQKHTHLAVSFGRSVPEAPVGRSTLQEVVGIRSDLAVEAGAPYAERLAAGELRL
GKEGTDRYRMVVGGAQAGDAGTYHCTAAEWIQDPDGSWAQIAEKRAVLAHVDVQ
TLSSQLAVTVGPGERRIGPGEPLELLCNVSGALPPAGRHAAYSVGWEMAPAGAPGPG
RLVAQLDTEGVGSLGPGYEGRHIAMEKVASRTYRLRLEAARPGDAGTYRCLAKAYV
RGSGTRLREAASARSRPLPVHVREEGVVLEAVAWLAGGTVYRGETASLLCNISVRGG
PPGLRLAASWWVERPEDGELSSVPAQLVGGVGQDGVAELGVRPGGGPVSVELVGPR
SHRLRLHSLGPEDEGVYHCAPSAWVQHADYSWYQAGSARSGPVTVYPYMHALDTLF
VPLLVGTGVALVTGATVLGTITCCFMKRLRKR; Peptide sequence of Isopeptide(1)
tag + Isopeptide(2) tag + Isopeptide(3) tag-IGSF8 VLM

TABLE 9
Fusion Protein or Peptide Comprising Isopeptide Tag and Targeting Moiety

SEQ ID NO: Sequence; Source
223:
GCTTCCGATTACAAGGATGACGATGACAAGGGTTCCCAAATGCAGCTGGTTCAAA
GTGGTGCTGAGGTCAAAAAACCAGGCGCGAGCGTAAAACTGTCCTGTAAAGCCA
GCGGATACACCTTCTCCAGCTACTGGATGCACTGGGTCCGACAGGCCCCAGGGCA
GAGGCTCGAATGGATGGGCGAGATCAACCCCGGCAATGGTCACACCAATTACAAT
GAAAAGTTCAAGAGCCGCGTGACCATTACTGTCGATAAATCTGCATCTACAGCAT
ACATGGAACTTTCCAGCCTTAGATCAGAGGACACAGCCGTATATTATTGTGCCAA
GATCTGGGGACCGTCCCTTACAAGTCCTTTCGATTACTGGGGTCAGGGGACGCTTG
TAACGGTATCCGGGGGGGGAGGTTCCGGCGGAGGCGGTTCAGGAGGGGGGGGTT
CCGGGGGCGGTGGATCTAATTTTATGCTTACGCAACCCCCGTCTGTAAGTGTTTCC
CCAGGGAAAACCGCTCGAATAACCTGTCGAGGAGACAACCTCGGCGATGTTAATG
TCCATTGGTATCAACAGCGACCTGGGCAAGCCCCGGTTTTGGTCATGTACTATGAT
GCGGACCGCCCCAGTGGCATACCGGAACGGTTCAGTGGAAGTAACTCTGGCAATA
CTGCAACGCTGACCATCAGTGGCGTTGAGGCGGGTGACGAGGCAGATTATTACTG
TCAGGTCTGGGACCGGACCAGTGAGTATGTTTTCGGAACCGGCACAAAAGTAACT
GTACTCGGGGGCGGTGGCGGTTCAGGTGGGGGGGGTAGTGGCGGAGGCGGAAGC
GGTTCTCATCACCATCACCACCATGGAGGAGGGGGCTCTGGCGGTGGGGGTTCCG
CCCATATCGTCATGGTCGATGCGATTAAGCCTACCAAG; Coding sequence of FV6A6-
Isopeptide(1) tag
224:
GSDYKDDDDKGSQMQLVQSGAEVKKPGASVKLSCKASGYTFSSYWMHWVRQAPG
QRLEWMGEINPGNGHTNYNEKFKSRVTITVDKSASTAYMELSSLRSEDTAVYYCAKI
WGPSLTSPFDYWGQGTLVTVSGGGGSGGGGSGGGGSGGGGSNFMLTQPPSVSVSPG
KTARITCRGDNLGDVNVHWYQQRPGQAPVLVMYYDADRPSGIPERFSGSNSGNTAT
LTISGVEAGDEADYYCQVWDRTSEYVFGTGTKVTVLGGGGGSGGGGSGGGGSGSHH
HHHHGGGGSGGGGSAHIVMVDAIKPTK; Peptide sequence of FV6A6-Isopeptide(1) tag
225:
GGTTCCGATTACAAGGATGACGATGACAAGGGTTCCGAAGTGCAGCTTGTAGAAA
GTGGGGGCGGACTGGTACAGCCGGGCGGGAGCCTCAGATTGTCATGCGCCGCTTC
TGGTTTCACTTTTTCTTCCTACGGTATGTCCTGGGTTAGACAAGCTCCTGGGAAGG
GTCTTGAGTGGGTGGCTACAATTACTAGTGGTGGTTCATACACGTACTATGTTGAC
AGTGTTAAGGGGCGATTTACTATAAGTAGAGATAATGCCAAGAACACACTCTACC
TTCAGATGAATAGCTTGGGGGGGGAAGATACAGCAGTTTATTATTGCGTTCGGATT
GGCGAGGACGCACTCGACTATTGGGGACAAGGGACTCTTGTTACGGTGTCTAGTG
GGGGGGGAGGTTCCGGCGGAGGCGGTTCAGGAGGGGGGGGTTCCGGGGGCGGTG
GATCTGACATCCAGATGACGCAATCCCCAAGTTCACTTAGCGCTTCAGTCGGCGA
CCGCGTTACCATAACATGCAGAGCAAGTCAAGACATTGCAGGGAGTCTTAATTGG
TTGCAGAAGCCAGGTAAAGCTATAAAGCGCCTTATATATGCCACCAGCAGTCTGG
ATTCTGGTGTACCGAAGAGATTCAGCGGTTCCAGAAGTGGCAGTGACTATACTCT
GACCATTTCTTCTCTCCAGCCTGAAGATTTCGCCACTTACTATTGTCTGCAATATG
GTTCTTTCCCACCAACATTCGGACAAGGTACTAAGGTCGAGATTAAGGGCGGTGG
CGGTTCAGGTGGGGGGGGTAGTGGCGGAGGCGGAAGCGGTTCTCATCACCATCAC
CACCATGGAGGAGGGGGCTCTGGCGGTGGGGGTTCCGCCCATATCGTCATGGTCG
ATGCGATTAAGCCTACCAAG; Coding sequence of FVALAC-Isopeptide(1) tag
226:
GSDYKDDDDKGSEVQLVESGGGLVQPGGSLRLSCAASGFTFSSYGMSWVRQAPGKG
LEWVATITSGGSYTYYVDSVKGRFTISRDNAKNTLYLQMNSLRAEDTAVYYCVRIGE
DALDYWGQGTLVTVSSGGGGSGGGGSGGGGSGGGGSDIQMTQSPSSLSASVGDRVTI
TCRASQDIAGSLNWLQKPGKAIKRLIYATSSLDSGVPKRFSGSRSGSDYTLTISSLQPED
FATYYCLQYGSFPPTFGQGTKVEIKGGGGSGGGGSGGGGSGSHHHHHHGGGGSGGG
GSAHIVMVDAIKPTK; Peptide sequence of FVALAC-Isopeptide(1) tag
227:
GCCCATATCGTCATGGTCGATGCGATTAAGCCTACCAAGGGAGGAGGGGGCTCTG
GCGGTGGGGGTTCCGGTTCCGATTACAAGGATGACGATGACAAGGGTTCCCAAAT
GCAGCTGGTTCAAAGTGGTGCTGAGGTCAAAAAACCAGGCGCGAGCGTAAAACT
GTCCTGTAAAGCCAGCGGATACACCTTCTCCAGCTACTGGATGCACTGGGTCCGA
CAGGCCCCAGGGCAGAGGCTCGAATGGATGGGCGAGATCAACCCCGGCAATGGT
CACACCAATTACAATGAAAAGTTCAAGAGCCGCGTGACCATTACTGTCGATAAAT
CTGCATCTACAGCATACATGGAACTTTCCAGCCTTAGATCAGAGGACACAGCCGT
ATATTATTGTGCCAAGATCTGGGGACCGTCCCTTACAAGTCCTTTCGATTACTGGG
GTCAGGGGACGCTTGTAACGGTATCCGGGGGGGGAGGTTCCGGCGGAGGGGGTTC
AGGAGGGGGGGGTTCCGGGGGCGGTGGATCTAATTTTATGCTTACGCAACCCCCG
TCTGTAAGTGTTTCCCCAGGGAAAACCGCTCGAATAACCTGTCGAGGAGACAACC
TCGGCGATGTTAATGTCCATTGGTATCAACAGCGACCTGGGCAAGCCCCGGTTTTG
GTCATGTACTATGATGCGGACCGCCCCAGTGGCATACCGGAACGGTTCAGTGGAA
GTAACTCTGGCAATACTGCAACGCTGACCATCAGTGGCGTTGAGGCGGGTGACGA
GGCAGATTATTACTGTCAGGTCTGGGACCGGACCAGTGAGTATGTTTTCGGAACC
GGCACAAAAGTAACTGTACTCGGGGGCGGTGGCGGTTCAGGTGGGGGGGGTAGT
GGCGGAGGCGGAAGCGGTTCTCATCACCATCACCACCAT; Coding sequence of
Isopeptide(1) tag-FV6A6
228:
AHIVMVDAIKPTKGGGGSGGGGSGSDYKDDDDKGSQMQLVQSGAEVKKPGASVKL
SCKASGYTFSSYWMHWVRQAPGQRLEWMGEINPGNGHTNYNEKFKSRVTITVDKSA
STAYMELSSLRSEDTAVYYCAKIWGPSLTSPFDYWGQGTLVTVSGGGGSGGGGSGG
GGSGGGGSNFMLTQPPSVSVSPGKTARITCRGDNLGDVNVHWYQQRPGQAPVLVMY
YDADRPSGIPERFSGSNSGNTATLTISGVEAGDEADYYCQVWDRTSEYVFGTGTKVT
VLGGGGGSGGGGSGGGGSGSHHHHHH; Peptide sequence of Isopeptide(1) tag-FV6A6
229:
CAGGTGCAGCTGGTGCAGAGCGGCGCCGAGGTGAAGAAGCCCGGCGCCAGCGTG
AAGGTGAGCTGCAAGGCCAGCGGCTACACCTTCACCGACTACGAGATGCACTGGG
TGAGGCAGGCCCCCGGCCAGGGCCTGGAGTGGATGGGCGCCCTGGACCCCAAGA
CCGGCGACACCGCCTACAGCCAGAAGTTCAAGGGCAGGGTGACCCTGACCGCCG
ACAAGAGCACCAGCACCGCCTACATGGAGCTGAGCAGCCTGACCAGCGAGGACA
CCGCCGTGTACTACTGCACCAGGTTCTACAGCTACACCTACTGGGGCCAGGGCAC
CCTGGTGACCGTGAGCAGCAGCAGCGGCGGCAGCAGCAGGAGCAGCAGCAGCGG
CGGCGGCGGCAGCGGCGGCGGCGGCGACGTGGTGATGACCCAGAGCCCCCTGAG
CCTGCCCGTGACCCCCGGCGAGCCCGCCAGCATCAGCTGCAGGAGCAGCCAGAGC
CTGGTGCACAGCAACGGCAACACCTACCTGCACTGGTACCTGCAGAAGCCCGGCC
AGAGCCCCCAGCTGCTGATCTACAAGGTGAGCAACAGGTTCAGCGGCGTGCCCGA
CAGGTTCAGCGGCAGCGGCAGCGGCACCGACTTCACCCTGAAGATCAGCAGGGTG
GAGGCCGAGGACGTGGGCGTGTACTACTGCAGCCAGAACACCCACGTGCCCCCCA
CCTTCGGCCAGGGCACCAAGCTGGAGATCAAGAGCGGCGGCGGCGGCAGCGGCG
GCGGCGGCAAGGAGACCGCCGCCGCCAAGTTCGAGAGGCAGCACATGGACAGCG
CCCACATCGTGATGGTGGACGCCTACAAGCCCACCAAG; Coding sequence of GC33 +
Isopeptide(1) tag
230:
QVQLVQSGAEVKKPGASVKVSCKASGYTFTDYEMHWVRQAPGQGLEWMGALDPK
TGDTAYSQKFKGRVTLTADKSTSTAYMELSSLTSEDTAVYYCTRFYSYTYWGQGTLV
TVSSSSGGSSRSSSSGGGGSGGGGDVVMTQSPLSLPVTPGEPASISCRSSQSLVHSNGN
TYLHWYLQKPGQSPQLLIYKVSNRFSGVPDRFSGSGSGTDFTLKISRVEAEDVGVYYC
SQNTHVPPTFGQGTKLEIKSGGGGSGGGGKETAAAKFERQHMDSAHIVMVDAYKPT
K; Peptide sequence of GC33 + Isopeptide(1) tag
231:
CAGGTGCAGCTGGTGCAGAGCGGCGCCGAGGTGAAGAAGCCCGGCGCCAGCGTG
AAGGTGAGCTGCAAGGCCAGCGGCTACACCTTCACCGACTACGAGATGCACTGGG
TGAGGCAGGCCCCCGGCCAGGGCCTGGAGTGGATGGGCGCCCTGGACCCCAAGA
CCGGCGACACCGCCTACAGCCAGAAGTTCAAGGGCAGGGTGACCCTGACCGCCG
ACAAGAGCACCAGCACCGCCTACATGGAGCTGAGCAGCCTGACCAGCGAGGACA
CCGCCGTGTACTACTGCACCAGGTTCTACAGCTACACCTACTGGGGCCAGGGCAC
CCTGGTGACCGTGAGCAGCAGCAGCGGCGGCAGCAGCAGGAGCAGCAGCAGCGG
CGGCGGCGGCAGCGGCGGCGGCGGCGACGTGGTGATGACCCAGAGCCCCCTGAG
CCTGCCCGTGACCCCCGGCGAGCCCGCCAGCATCAGCTGCAGGAGCAGCCAGAGC
CTGGTGCACAGCAACGGCAACACCTACCTGCACTGGTACCTGCAGAAGCCCGGCC
AGAGCCCCCAGCTGCTGATCTACAAGGTGAGCAACAGGTTCAGCGGCGTGCCCGA
CAGGTTCAGCGGCAGCGGCAGCGGCACCGACTTCACCCTGAAGATCAGCAGGGTG
GAGGCCGAGGACGTGGGCGTGTACTACTGCAGCCAGAACACCCACGTGCCCCCCA
CCTTCGGCCAGGGCACCAAGCTGGAGATCAAGAGCGGCGGCGGCGGCAGCGGCG
GCGGCGGCGAGCAGAAGCTGATCAGCGAGGAGGACCTGAAGCTGGGCGACATCG
AGTTCATCAAGGTGAACAAG; Coding sequence of GC33 + Isopeptide(2) tag
232:
QVQLVQSGAEVKKPGASVKVSCKASGYTFTDYEMHWVRQAPGQGLEWMGALDPK
TGDTAYSQKFKGRVTLTADKSTSTAYMELSSLTSEDTAVYYCTRFYSYTYWGQGTLV
TVSSSSGGSSRSSSSGGGGSGGGGDVVMTQSPLSLPVTPGEPASISCRSSQSLVHSNGN
TYLHWYLQKPGQSPQLLIYKVSNRFSGVPDRFSGSGSGTDFTLKISRVEAEDVGVYYC
SQNTHVPPTFGQGTKLEIKSGGGGSGGGGEQKLISEEDLKLGDIEFIKVNK; Peptide
sequence of GC33 + Isopeptide(2) tag
233:
CAGGTGCAGCTGGTGCAGAGCGGCGCCGAGGTGAAGAAGCCCGGCGCCAGCGTG
AAGGTGAGCTGCAAGGCCAGCGGCTACACCTTCACCGACTACGAGATGCACTGGG
TGAGGCAGGCCCCCGGCCAGGGCCTGGAGTGGATGGGCGCCCTGGACCCCAAGA
CCGGCGACACCGCCTACAGCCAGAAGTTCAAGGGCAGGGTGACCCTGACCGCCG
ACAAGAGCACCAGCACCGCCTACATGGAGCTGAGCAGCCTGACCAGCGAGGACA
CCGCCGTGTACTACTGCACCAGGTTCTACAGCTACACCTACTGGGGCCAGGGCAC
CCTGGTGACCGTGAGCAGCAGCAGCGGCGGCAGCAGCAGGAGCAGCAGCAGCGG
CGGCGGCGGCAGCGGCGGCGGCGGCGACGTGGTGATGACCCAGAGCCCCCTGAG
CCTGCCCGTGACCCCCGGCGAGCCCGCCAGCATCAGCTGCAGGAGCAGCCAGAGC
CTGGTGCACAGCAACGGCAACACCTACCTGCACTGGTACCTGCAGAAGCCCGGCC
AGAGCCCCCAGCTGCTGATCTACAAGGTGAGCAACAGGTTCAGCGGCGTGCCCGA
CAGGTTCAGCGGCAGCGGCAGCGGCACCGACTTCACCCTGAAGATCAGCAGGGTG
GAGGCCGAGGACGTGGGCGTGTACTACTGCAGCCAGAACACCCACGTGCCCCCCA
CCTTCGGCCAGGGCACCAAGCTGGAGATCAAGAGCGGCGGCGGCGGCAGCGGCG
GCGGCGGCGGCAAGCCCATCCCCAACCCCCTGCTGGGCCTGGACAGCACCGACCC
CATCGTGATGATCGACAACGACAAGCCCATCACC; Coding sequence of GC33 +
Isopeptide(3) tag
234
QVQLVQSGAEVKKPGASVKVSCKASGYTFTDYEMHWVRQAPGQGLEWMGALDPK
TGDTAYSQKFKGRVTLTADKSTSTAYMELSSLTSEDTAVYYCTRFYSYTYWGQGTLV
TVSSSSGGSSRSSSSGGGGSGGGGDVVMTQSPLSLPVTPGEPASISCRSSQSLVHSNGN
TYLHWYLQKPGQSPQLLIYKVSNRFSGVPDRFSGSGSGTDFTLKISRVEAEDVGVYYC
SQNTHVPPTFGQGTKLEIKSGGGGSGGGGGKPIPNPLLGLDSTDPIVMIDNDKPIT;
Peptide sequence of GC33 + Isopeptide(3) tag
235:
ACCCACGTGAGCCCCAACCAGGGCGGCCTGCCCAGCAGCGGCGGCGGCGGCAGC
GGCGGCGGCGGCAAGGAGACCGCCGCCGCCAAGTTCGAGAGACAGCACATGGAC
AGCGCCCACATCGTGATGGTGGACGCCTACAAGCCCACCAAG; Coding sequence of
N-terminal PEPN + Isopeptide(1) tag
236: THVSPNQGGLPSSGGGGSGGGGKETAAAKFERQHMDSAHIVMVDAYKPTK;
Peptide sequence of N-terminal PEPN + Isopeptide(1) tag
237:
GCCCACATCGTGATGGTGGACGCCTACAAGCCCACCAAGAGCGGCGGCGGCGGC
AGCGGCGGCGGCGGCAAGGAGACCGCCGCCGCCAAGTTCGAGAGACAGCACATG
GACAGCACCCACGTGAGCCCCAACCAGGGCGGCCTGCCCAGC; Coding sequence of
C-terminal PEPN + Isopeptide(1) tag
238: AHIVMVDAYKPTKSGGGGSGGGGKETAAAKFERQHMDSTHVSPNQGGLPS;
Peptide sequence of C-terminal PEPN + Isopeptide(1) tag
239:
ACCCACGTGAGCCCCAACCAGGGCGGCCTGCCCAGCAGCGGCGGCGGCGGCAGC
GGCGGCGGCGGCGAGCAGAAGCTGATCAGCGAGGAGGACCTGAAGCTGGGCGAC
ATCGAGTTCATCAAGGTGAACAAG; Coding sequence of N-terminal PEPN +
Isopeptide(2) tag
240: THVSPNQGGLPSSGGGGSGGGGEQKLISEEDLKLGDIEFIKVNK; Peptide sequence
of N-terminal PEPN + Isopeptide(2) tag
241:
AAGCTGGGCGACATCGAGTTCATCAAGGTGAACAAGAGCGGCGGCGGCGGCAGC
GGCGGCGGCGGCGAGCAGAAGCTGATCAGCGAGGAGGACCTGACCCACGTGAGC
CCCAACCAGGGCGGCCTGCCCAGC; Coding sequence of C-terminal PEPN +
Isopeptide(2) tag
242: KLGDIEFIKVNKSGGGGSGGGGEQKLISEEDLTHVSPNQGGLPS; Peptide sequence
of C-terminal PEPN + Isopeptide(2) tag
243:
ACCCACGTGAGCCCCAACCAGGGCGGCCTGCCCAGCAGCGGCGGCGGCGGCAGC
GGCGGCGGCGGCGGCAAGCCCATCCCCAACCCCCTGCTGGGCCTGGACAGCACCG
ACCCCATCGTGATGATCGACAACGACAAGCCCATCACC; Coding sequence of N~
terminal PEPN + Isopeptide(3) tag
244: THVSPNQGGLPSSGGGGSGGGGGKPIPNPLLGLDSTDPIVMIDNDKPIT; Peptide
sequence of N-terminal PEPN + Isopeptide(3) tag
245:
GACCCCATCGTGATGATCGACAACGACAAGCCCATCACCAGCGGCGGCGGCGGC
AGCGGCGGCGGCGGCGGCAAGCCCATCCCCAACCCCCTGCTGGGCCTGGACAGCA
CCACCCACGTGAGCCCCAACCAGGGCGGCCTGCCCAGC, Coding sequence of C-
terminal PEPN + Isopeptide(3) tag
246: DPIVMIDNDKPITSGGGGSGGGGGKPIPNPLLGLDSTTHVSPNQGGLPS; Peptide
sequence of C-terminal PEPN + Isopeptide(3) tag

TABLE 10
Fusion Protein Comprising Isopeptide Domain and Targeting Moiety

SEQ ID NO: Sequence; Source
247:
CAGGTGCAGCTGGTGCAGAGCGGCGCCGAGGTGAAGAAGCCCGGCGCCAGCGTG
AAGGTGAGCTGCAAGGCCAGCGGCTACACCTTCACCGACTACGAGATGCACTGGG
TGAGGCAGGCCCCCGGCCAGGGCCTGGAGTGGATGGGCGCCCTGGACCCCAAGA
CCGGCGACACCGCCTACAGCCAGAAGTTCAAGGGCAGGGTGACCCTGACCGCCG
ACAAGAGCACCAGCACCGCCTACATGGAGCTGAGCAGCCTGACCAGCGAGGACA
CCGCCGTGTACTACTGCACCAGGTTCTACAGCTACACCTACTGGGGCCAGGGCAC
CCTGGTGACCGTGAGCAGCAGCAGCGGCGGCAGCAGCAGGAGCAGCAGCAGCGG
CGGCGGCGGCAGCGGCGGCGGCGGCGACGTGGTGATGACCCAGAGCCCCCTGAG
CCTGCCCGTGACCCCCGGCGAGCCCGCCAGCATCAGCTGCAGGAGCAGCCAGAGC
CTGGTGCACAGCAACGGCAACACCTACCTGCACTGGTACCTGCAGAAGCCCGGCC
AGAGCCCCCAGCTGCTGATCTACAAGGTGAGCAACAGGTTCAGCGGCGTGCCCGA
CAGGTTCAGCGGCAGCGGCAGCGGCACCGACTTCACCCTGAAGATCAGCAGGGTG
GAGGCCGAGGACGTGGGCGTGTACTACTGCAGCCAGAACACCCACGTGCCCCCCA
CCTTCGGCCAGGGCACCAAGCTGGAGATCAAGAGCGGCGGCGGCGGCAGCGGCG
GCGGCGGCAAGGAGACCGCCGCCGCCAAGTTCGAGAGGCAGCACATGGACAGCG
ACAGCGCCACCCACATCAAGTTCAGCAAGAGGGACGAGGACGGCAAGGAGCTGG
CCGGCGCCACCATGGAGCTGAGGGACAGCAGCGGCAAGACCATCAGCACCTGGA
TCAGCGACGGCCAGGTGAAGGACTTCTACCTGTACCCCGGCAAGTACACCTTCGT
GGAGACCGCCGCCCCCGACGGCTACGAGGTGGCCACCGCCATCACCTTCACCGTG
AACGAGCAGGGCCAGGTGACCGTGAACGGC; Coding sequence of GC33 +
Isopeptide(1) domain
248:
QVQLVQSGAEVKKPGASVKVSCKASGYTFTDYEMHWVRQAPGQGLEWMGALDPK
TGDTAYSQKFKGRVTLTADKSTSTAYMELSSLTSEDTAVYYCTRFYSYTYWGQGTLV
TVSSSSGGSSRSSSSGGGGSGGGGDVVMTQSPLSLPVTPGEPASISCRSSQSLVHSNGN
TYLHWYLQKPGQSPQLLIYKVSNRFSGVPDRFSGSGSGTDFTLKISRVEAEDVGVYYC
SQNTHVPPTFGQGTKLEIKSGGGGSGGGGKETAAAKFERQHMDSDSATHIKFSKRDE
DGKELAGATMELRDSSGKTISTWISDGQVKDFYLYPGKYTFVETAAPDGYEVATAITF
TVNEQGQVTVNG; Peptide sequence of GC33 + Isopeptide(1) domain
249:
CAGGTGCAGCTGGTGCAGAGCGGCGCCGAGGTGAAGAAGCCCGGCGCCAGCGTG
AAGGTGAGCTGCAAGGCCAGCGGCTACACCTTCACCGACTACGAGATGCACTGGG
TGAGGCAGGCCCCCGGCCAGGGCCTGGAGTGGATGGGCGCCCTGGACCCCAAGA
CCGGCGACACCGCCTACAGCCAGAAGTTCAAGGGCAGGGTGACCCTGACCGCCG
ACAAGAGCACCAGCACCGCCTACATGGAGCTGAGCAGCCTGACCAGCGAGGACA
CCGCCGTGTACTACTGCACCAGGTTCTACAGCTACACCTACTGGGGCCAGGGCAC
CCTGGTGACCGTGAGCAGCAGCAGCGGCGGCAGCAGCAGGAGCAGCAGCAGCGG
CGGCGGCGGCAGCGGCGGCGGCGGCGACGTGGTGATGACCCAGAGCCCCCTGAG
CCTGCCCGTGACCCCCGGCGAGCCCGCCAGCATCAGCTGCAGGAGCAGCCAGAGC
CTGGTGCACAGCAACGGCAACACCTACCTGCACTGGTACCTGCAGAAGCCCGGCC
AGAGCCCCCAGCTGCTGATCTACAAGGTGAGCAACAGGTTCAGCGGCGTGCCCGA
CAGGTTCAGCGGCAGCGGCAGCGGCACCGACTTCACCCTGAAGATCAGCAGGGTG
GAGGCCGAGGACGTGGGCGTGTACTACTGCAGCCAGAACACCCACGTGCCCCCCA
CCTTCGGCCAGGGCACCAAGCTGGAGATCAAGAGCGGCGGCGGCGGCAGCGGCG
GCGGCGGCGAGCAGAAGCTGATCAGCGAGGAGGACCTGGGCAGCCACATGAAGC
CCCTGAGGGGCGCCGTGTTCAGCCTGCAGAAGCAGCACCCCGACTACCCCGACAT
CTACGGCGCCATCGACCAGAACGGCACCTACCAGAACGTGAGGACCGGCGAGGA
CGGCAAGCTGACCTTCAAGAACCTGAGCGACGGCAAGTACAGGCTGTTCGAGAAC
AGCGAGCCCGCCGGCTACAAGCCCGTGCAGAACAAGCCCATCGTGGCCTTCCAGA
TCGTGAACGGCGAGGTGAGGGACGTGACCAGCATCGTGCCCCAGGACATCCCCGC
CACCTACGAGTTCACCAACGGCAAGCACTACATCACCAACGAGCCCATCCCCCCC
AAG; Coding sequence of GC33 + Isopeptide(2) domain
250:
QVQLVQSGAEVKKPGASVKVSCKASGYTFTDYEMHWVRQAPGQGLEWMGALDPK
TGDTAYSQKFKGRVTLTADKSTSTAYMELSSLTSEDTAVYYCTRFYSYTYWGQGTLV
TVSSSSGGSSRSSSSGGGGSGGGGDVVMTQSPLSLPVTPGEPASISCRSSQSLVHSNGN
TYLHWYLQKPGQSPQLLIYKVSNRFSGVPDRFSGSGSGTDFTLKISRVEAEDVGVYYC
SQNTHVPPTFGQGTKLEIKSGGGGSGGGGEQKLISEEDLGSHMKPLRGAVFSLQKQHP
DYPDIYGAIDQNGTYQNVRTGEDGKLTFKNLSDGKYRLFENSEPAGYKPVQNKPIVA
FQIVNGEVRDVTSIVPQDIPATYEFTNGKHYITNEPIPPK; Peptide sequence of GC33 +
Isopeptide(2) domain
251:
CAGGTGCAGCTGGTGCAGAGCGGCGCCGAGGTGAAGAAGCCCGGCGCCAGCGTG
AAGGTGAGCTGCAAGGCCAGCGGCTACACCTTCACCGACTACGAGATGCACTGGG
TGAGGCAGGCCCCCGGCCAGGGCCTGGAGTGGATGGGCGCCCTGGACCCCAAGA
CCGGCGACACCGCCTACAGCCAGAAGTTCAAGGGCAGGGTGACCCTGACCGCCG
ACAAGAGCACCAGCACCGCCTACATGGAGCTGAGCAGCCTGACCAGCGAGGACA
CCGCCGTGTACTACTGCACCAGGTTCTACAGCTACACCTACTGGGGCCAGGGCAC
CCTGGTGACCGTGAGCAGCAGCAGCGGCGGCAGCAGCAGGAGCAGCAGCAGCGG
CGGCGGCGGCAGCGGCGGCGGCGGCGACGTGGTGATGACCCAGAGCCCCCTGAG
CCTGCCCGTGACCCCCGGCGAGCCCGCCAGCATCAGCTGCAGGAGCAGCCAGAGC
CTGGTGCACAGCAACGGCAACACCTACCTGCACTGGTACCTGCAGAAGCCCGGCC
AGAGCCCCCAGCTGCTGATCTACAAGGTGAGCAACAGGTTCAGCGGCGTGCCCGA
CAGGTTCAGCGGCAGCGGCAGCGGCACCGACTTCACCCTGAAGATCAGCAGGGTG
GAGGCCGAGGACGTGGGCGTGTACTACTGCAGCCAGAACACCCACGTGCCCCCCA
CCTTCGGCCAGGGCACCAAGCTGGAGATCAAGAGCGGCGGCGGCGGCAGCGGCG
GCGGCGGCGGCAAGCCCATCCCCAACCCCCTGCTGGGCCTGGACAGCACCAGCAG
CGGCCTGGTGCCCAGGGGCAGCCACATGGCCAGCATGACCGGCGGCCAGCAGAT
GGGCAGGGGCAGCAGCGGCCTGAGCGGCGAGACCGGCCAGAGCGGCAACACCAC
CATCGAGGAGGACAGCACCACCCACGTGAAGTTCAGCAAGAGGGACGCCAACGG
CAAGGAGCTGGCCGGCGCCATGATCGAGCTGAGGAACCTGAGCGGCCAGACCAT
CCAGAGCTGGATCAGCGACGGCACCGTGAAGGTGTTCTACCTGATGCCCGGCACC
TACCAGTTCGTGGAGACCGCCGCCCCCGAGGGCTACGAGCTGGCCGCCCCCATCA
CCTTCACCATCGACGAGAAGGGCCAGATCTGGGTGGACAGC; Coding sequence of
GC33 + Isopeptide(3) domain
252:
QVQLVQSGAEVKKPGASVKVSCKASGYTFTDYEMHWVRQAPGQGLEWMGALDPK
TGDTAYSQKFKGRVTLTADKSTSTAYMELSSLTSEDTAVYYCTRFYSYTYWGQGTLV
TVSSSSGGSSRSSSSGGGGSGGGGDVVMTQSPLSLPVTPGEPASISCRSSQSLVHSNGN
TYLHWYLQKPGQSPQLLIYKVSNRFSGVPDRFSGSGSGTDFTLKISRVEAEDVGVYYC
SQNTHVPPTFGQGTKLEIKSGGGGSGGGGGKPIPNPLLGLDSTSSGLVPRGSHMASMT
GGQQMGRGSSGLSGETGQSGNTTIEEDSTTHVKFSKRDANGKELAGAMIELRNLSGQ
TIQSWISDGTVKVFYLMPGTYQFVETAAPEGYELAAPITFTIDEKGQIWVDS; Peptide
sequence of GC33 + Isopeptide(3) domain
253:
ACCCACGTGAGCCCCAACCAGGGCGGCCTGCCCAGCAGCGGCGGCGGCGGCAGC
GGCGGCGGCGGCAAGGAGACCGCCGCCGCCAAGTTCGAGAGGCAGCACATGGAC
AGCGACAGCGCCACCCACATCAAGTTCAGCAAGAGGGACGAGGACGGCAAGGAG
CTGGCCGGCGCCACCATGGAGCTGAGGGACAGCAGCGGCAAGACCATCAGCACC
TGGATCAGCGACGGCCAGGTGAAGGACTTCTACCTGTACCCCGGCAAGTACACCT
TCGTGGAGACCGCCGCCCCCGACGGCTACGAGGTGGCCACCGCCATCACCTTCAC
CGTGAACGAGCAGGGCCAGGTGACCGTGAACGGC; Coding sequence of N-terminal
PEPN + Isopeptide(1) domain
254:
THVSPNQGGLPSSGGGGSGGGGKETAAAKFERQHMDSDSATHIKFSKRDEDGKELAG
ATMELRDSSGKTISTWISDGQVKDFYLYPGKYTFVETAAPDGYEVATAITFTVNEQGQ
VTVNG; Peptide sequence of N-terminal PEPN + Isopeptide(1) domain
255:
GACAGCGCCACCCACATCAAGTTCAGCAAGAGGGACGAGGACGGCAAGGAGCTG
GCCGGCGCCACCATGGAGCTGAGGGACAGCAGCGGCAAGACCATCAGCACCTGG
ATCAGCGACGGCCAGGTGAAGGACTTCTACCTGTACCCCGGCAAGTACACCTTCG
TGGAGACCGCCGCCCCCGACGGCTACGAGGTGGCCACCGCCATCACCTTCACCGT
GAACGAGCAGGGCCAGGTGACCGTGAACGGCAGCGGCGGCGGCGGCAGCGGCGG
CGGCGGCAAGGAGACCGCCGCCGCCAAGTTCGAGAGGCAGCACATGGACAGCAC
CCACGTGAGCCCCAACCAGGGCGGCCTGCCCAGC; Coding sequence of C-terminal
PEPN + Isopeptide(1) domain
256:
DSATHIKFSKRDEDGKELAGATMELRDSSGKTISTWISDGQVKDFYLYPGKYTFVETA
APDGYEVATAITFTVNEQGQVTVNGSGGGGSGGGGKETAAAKFERQHMDSTHVSPN
QGGLPS; Peptide sequence of C-terminal PEPN + Isopeptide(1) domain
257:
ACCCACGTGAGCCCCAACCAGGGCGGCCTGCCCAGCAGCGGCGGCGGCGGCAGC
GGCGGCGGCGGCGAGCAGAAGCTGATCAGCGAGGAGGACCTGGGCAGCCACATG
AAGCCCCTGAGGGGCGCCGTGTTCAGCCTGCAGAAGCAGCACCCCGACTACCCCG
ACATCTACGGCGCCATCGACCAGAACGGCACCTACCAGAACGTGAGGACCGGCG
AGGACGGCAAGCTGACCTTCAAGAACCTGAGCGACGGCAAGTACAGGCTGTTCG
AGAACAGCGAGCCCGCCGGCTACAAGCCCGTGCAGAACAAGCCCATCGTGGCCTT
CCAGATCGTGAACGGCGAGGTGAGGGACGTGACCAGCATCGTGCCCCAGGACAT
CCCCGCCACCTACGAGTTCACCAACGGCAAGCACTACATCACCAACGAGCCCATC
CCCCCCAAG; Coding sequence of N-terminal PEPN + Isopeptide(2) domain
258:
THVSPNQGGLPSSGGGGSGGGGEQKLISEEDLGSHMKPLRGAVFSLQKQHPDYPDIY
GAIDQNGTYQNVRTGEDGKLTFKNLSDGKYRLFENSEPAGYKPVQNKPIVAFQIVNG
EVRDVTSIVPQDIPATYEFTNGKHYITNEPIPPK; Peptide sequence of N-terminal PEPN +
Isopeptide(2) domain
259:
GGCAGCCACATGAAGCCCCTGAGGGGCGCCGTGTTCAGCCTGCAGAAGCAGCACC
CCGACTACCCCGACATCTACGGCGCCATCGACCAGAACGGCACCTACCAGAACGT
GAGGACCGGCGAGGACGGCAAGCTGACCTTCAAGAACCTGAGCGACGGCAAGTA
CAGGCTGTTCGAGAACAGCGAGCCCGCCGGCTACAAGCCCGTGCAGAACAAGCC
CATCGTGGCCTTCCAGATCGTGAACGGCGAGGTGAGGGACGTGACCAGCATCGTG
CCCCAGGACATCCCCGCCACCTACGAGTTCACCAACGGCAAGCACTACATCACCA
ACGAGCCCATCCCCCCCAAGAGCGGCGGCGGCGGCAGCGGCGGCGGCGGCGAGC
AGAAGCTGATCAGCGAGGAGGACCTGACCCACGTGAGCCCCAACCAGGGGGGCC
TGCCCAGC, Coding sequence of C-terminal PEPN + Isopeptide(2) domain
260:
GSHMKPLRGAVFSLQKQHPDYPDIYGAIDQNGTYQNVRTGEDGKLTFKNLSDGKYR
LFENSEPAGYKPVQNKPIVAFQIVNGEVRDVTSIVPQDIPATYEFTNGKHYITNEPIPPK
SGGGGSGGGGEQKLISEEDLTHVSPNQGGLPS; Peptide sequence of C-terminal PEPN +
Isopeptide(2) domain
261:
ACCCACGTGAGCCCCAACCAGGGCGGCCTGCCCAGCAGCGGCGGCGGCGGCAGC
GGCGGCGGCGGCGGCAAGCCCATCCCCAACCCCCTGCTGGGCCTGGACAGCACCA
GCAGCGGCCTGGTGCCCAGGGGCAGCCACATGGCCAGCATGACCGGCGGCCAGC
AGATGGGCAGGGGCAGCAGCGGCCTGAGCGGCGAGACCGGCCAGAGCGGCAACA
CCACCATCGAGGAGGACAGCACCACCCACGTGAAGTTCAGCAAGAGGGACGCCA
ACGGCAAGGAGCTGGCCGGCGCCATGATCGAGCTGAGGAACCTGAGCGGCCAGA
CCATCCAGAGCTGGATCAGCGACGGCACCGTGAAGGTGTTCTACCTGATGCCCGG
CACCTACCAGTTCGTGGAGACCGCCGCCCCCGAGGGCTACGAGCTGGCCGCCCCC
ATCACCTTCACCATCGACGAGAAGGGCCAGATCTGGGTGGACAGC; Coding
sequence of N-terminal PEPN + Isopeptide(3) domain
262:
THVSPNQGGLPSSGGGGSGGGGGKPIPNPLLGLDSTSSGLVPRGSHMASMTGGQQMG
RGSSGLSGETGQSGNTTIEEDSTTHVKFSKRDANGKELAGAMIELRNLSGQTIQSWISD
GTVKVFYLMPGTYQFVETAAPEGYELAAPITFTIDEKGQIWVDS; Peptide sequence of
N-terminal PEPN + Isopeptide(3) domain
263:
AGCAGCGGCCTGGTGCCCAGGGGCAGCCACATGGCCAGCATGACCGGCGGCCAG
CAGATGGGCAGGGGCAGCAGCGGCCTGAGCGGCGAGACCGGCCAGAGCGGCAAC
ACCACCATCGAGGAGGACAGCACCACCCACGTGAAGTTCAGCAAGAGGGACGCC
AACGGCAAGGAGCTGGCCGGCGCCATGATCGAGCTGAGGAACCTGAGCGGCCAG
ACCATCCAGAGCTGGATCAGCGACGGCACCGTGAAGGTGTTCTACCTGATGCCCG
GCACCTACCAGTTCGTGGAGACCGCCGCCCCCGAGGGCTACGAGCTGGCCGCCCC
CATCACCTTCACCATCGACGAGAAGGGCCAGATCTGGGTGGACAGCAGCGGCGGC
GGCGGCAGCGGCGGCGGCGGCGGCAAGCCCATCCCCAACCCCCTGCTGGGCCTGG
ACAGCACCACCCACGTGAGCCCCAACCAGGGCGGCCTGCCCAGC; Coding sequence
of C-terminal PEPN + Isopeptide(3) domain
264:
SSGLVPRGSHMASMTGGQQMGRGSSGLSGETGQSGNTTIEEDSTTHVKFSKRDANGK
ELAGAMIELRNLSGQTIQSWISDGTVKVFYLMPGTYQFVETAAPEGYELAAPITFTIDE
KGQIWVDSSGGGGSGGGGGKPIPNPLLGLDSTTHVSPNQGGLPS; Peptide sequence of
C-terminal PEPN + Isopeptide(3) domain

TABLE 11
Isopeptide Protein*

SEQ ID NO: Sequence; Source
265:
MTKSVKFLVLLLVMILPIAGALLIGPISFGAELSKSSIVDKVELDHTTLYQGEMTSIKVS
FSDKENQKIKPGDTITLTLPNALVGMTENDGSPRKINLNGLGEVFIYKDHVVATFNEK
VESLHNVNGHFSFGIKTLITNSSQPNVIETDFGTATATQRLTIEGVTNTETGQIERDYPF
FYKVGDLAGESNQVRWFLNVNLNKSDVTEDISIADRQGSGQQLNKESFTFDIVNDKE
TKYISLAEFEQQGYGKIDFVTDNDFNLRFYRDKARFTSFIVRYTSTITEAGQHQATFEN
SYDINYQLNNQDATNEKNTSQVKNVFVEGEASGNQNVEMPTEESLDIPLETIDEWEPK
TPTSEQATETSEKTGATETAESSQPEVHVSPTEEENPDESETLGTIEPIIPEKPSVTTKEN
GVTETAESSQPEVHVSPTEEENPDESETLGTIAPILPEKPSVTTEENGTTETAESSQPKV
HVSPTEEENPDESETLGTIAPILPEKPSVTTEENGTTETAESSQPEVHVSSAEEENPDESE
TLGTIAPILPEKPSVTTEENGATETAESSQSEVHVSPTKEITITEKKQPSTETTVETNKNV
TSKNQPQILNAPLNTVKNEGSPQLAPQLLSEPIQKLNEANGQRELPKTGTTKTPFMLIA
GILASTFAVLGVSYLQIRKN; ACE19_Q9F865
266:
MKKIFSVLLVLFLTFSTWSSVLVKADSPSKGTLTIHKYEQEKDGAQGLEGDGSANQEV
PKDVKPLKGVTFEVKRVASFEKISNDGKIVKEDVKPVMGATPNQVVTDDNGQAVLK
DLPLGRYEVKEVAGPPHVNLNPNTYTVDIPLINKEGKVLNYDVHMYPKNEIKRGAV
DLIKTGVNEKALAGAVFSLFKKDGTEVKKELATDANGHIRVQGLEYGEYYFQETKAP
KGYVIDPTKREFFVKNSGTINEDGTITSGTVVKIEVKNNEEPTIDKKINGKLEALPINPL
TNYNYDIKTLIPEDIKEYKKYVVTDTLDNRLVIQGKPIVKIDGAEVNANVVEVAIEGQ
KVTATVKDFTKLDGKKEFHLQIKSQVKEGVPSGSEILNTAKIHFTNKNDVIGEKESKP
VVVIPTTGHIELTKIDSANKNKLKGAEFVLKDNNGKIVVVAGKEVTGVSDENGVIKWS
NIPYGDYQIFETKAPTYTKEDGTKTSYQLLKDPIDVKISENNQTVKLTIENNKSGWILP
VTGGIGTTLFTVIGLTLMLTAAFVFFRKKFARN; BCPA_Q81D71
267:
MNKNVLKFMVFIMLLNIITPLFNKNEAFAARDISSTNVTDLTVSPSKIEDGGKTTVKM
TFDDKNGKIQNGDMIKVAWPTSGTVKIEGYSKTVPLTVKGEQVGQAVITPDGATITEN
DKVEKLSDVSGFAEFEVQGRNLTQTNTSDDKVATITSGNKSTNVTVHKSEAGTSSVF
YYKTGDMLPEDTTHVRWFLNINNEKSYVSKDITIKDQIQGGQQLDLSTLNINVTGTHS
NYYSGQSAITDFEKAFPGSKITVDNTKNTIDVTIPQGYGSYNSFSINYKTKITNEQQKEF
VNNSQAWYQEHGKEEVNGKSFNHTVHNINANAGIEGTVKGELKVLKQDKDTKAPIA
NVKFKLSKKDGSVVKDNQKEIEIITDANGIANIKALPSGDYILKEIEAPRPYTFDKDKE
YPFTMKDTDNQGYFTTIENAKAIEKTKDVSAQKVWEGTQKVKPTIYFKLYKQDDNQ
NTTPVDKAEIKKLEDGTTKVTWSNLPENDKNGKAIKYLVKEVNAQGEDTTPEGYTK
KENGLVVTNTEKPIETTSISGEKVWDDKDNQDGKRPEKVSVNLLANGEKVKTLDVTS
ETNWKYEFKDLPKYDEGKKIEYTVTEDHVKDYTTDINGTTITNKYTPGETSATVTKN
WDDNNNQDGKRPTEIKVELYQDGKATGKTAILNESNNWTHTWTGLDEKAKGQQVK
YTVEELTKVKGYTTHVDNNDMGNLIVTNKYTPETTSISGEKVWDDKDNQDGKRPEK
VSVNLLADGEKVKTLDVTSETNWKYEFKDLPKYDEGKKIEYTVTEDHVKDYTTDIN
GTTITNKYTPGETSATVTKNWDDNNNQDGKRPTEIKVELYQDGKATGKTAILNESNN
WTHTWTGLDEKAKGQQVKYTVEELTKVKGYTTHVDNNDMGNLIVINKYTPETTSIS
GEKVWDDKDNQDGKRPEKVSVNLLANGEKVKTLDVTSETNWKYEFKDLPKYDEGK
KIEYTVTEDHVKDYTTDINGTTITNKYTPGETSATVTKNWDDNNNQDGKRPTEIKVEL
YQDGKATGKTAILNESNNWTHTWTGLDEKAKGQQVKYTVDELTKVNGYTTHVDNN
DMGNLIVTNKYTPKKPNKPIYPEKPKDKTPPTKPDHSNKVKPTPPDKPSKVDKDDQPK
DNKTKPENPLKELPKTGMKIITSWITWVFIGILGLYLILRKRFNS; Cna_Q53654
268:
MTQKNSYKLSFLLSLTGFILGLLLVFIGLSGVSVGHAETRNGANKQGAFEIKKNKSQE
EYNYEVYDNRNILQDGEHKLEIKRVDGTGKTYQGFCFQLTKNFPTAQGVSKKLYKKL
SSSDEETLKQYASKYTSNRRGDTSGNLKKQIAKVLTEGYPTNKSDWLNGLTENEKIEV
TQDAIWYFTETTVPADRSYTNRNVNSQKMKEVYQKLIDTTDIDKYEDVQFDLFVPQD
TNLQAVISVEPVIESLPWTSLKPIAQKDITAKKIWVDAPKEKPIIYFKLYRQLPGEKEVA
VDDAELKQINSEGQQEISVTWTNQLVTDEKGMAYIYSVKEVDKNGELLEPKDYIKKE
DGLTVTNTYVKPTSGHYDIEVTFGNGHIDITEDTTPDIVSGENQMKQIEGEDSKPIDEV
TENNLIEFGKNTMPGEEDGTNSNKYEEVEDSRPVDTLSGLSSEQGQSGDMTIEEDSAT
HIKFSKRDIDGKELAGATMELRDSSGKTISTWISDGQVKDFYLMPGKYTFVETAAPDG
YEIATAITFTVNEQGQVTVNGKATKGDAHIVMVDAYKPTKGSGQVIDIEEKLPDEQG
HSGSTTEIEDSKSSDLIIGGQGEVVDTTEDTQSGMTGHSASTTEIEDSKSSDVIVGGQG
QIVETTEDTQTGMHGDSGRKTEVEDTKLVQSFHFDNKESESNSEIPKKDKPKSNTSLP
ATGEKQHNKFFWMVTSCSLISSVFVISLKTKKCLSSC; FbabB_Q6A1F3
269:
MRGEKMKKTRFPNKLNTLNTQRVLSKNSKRFTVTLVGVFLMIFALVTSMVGAKTVF
GLVESSTPNAINPDSSSEYRWYGYESYVRGHPYYKQFRVAHDLRVNLEGSRSYQVYC
FNLKKAFPLGSDSSVKKWYKKHDGISTKFEDYAISPRITGDELNQKLRAVMYNGHPQ
NANGIMEGLEPLNAIRVTQEAVWYYSDNAPISNPDESFKRESESNLVSTSQLSLMRQA
LKQLIDPNLATKMPKQVPDDFQLSIFESEDKGDKYNKGYQNLLSGGLVPTKPPTPGDP
PMPPNQPQTTSVLIRKYAIGDYSKLLEGATLQLTGDNVNSFQARVFSSNDIGERIELSD
GTYTLTELNSPAGYSIAEPITFKVEAGKVYTIIDGKQIENPNKEIVEPYSVEAYNDFEEF
SVLTTQNYAKFYYAKNKNGSSQVVYCFNADLKSPPDSEDGGKTMTPDFTTGEVKYT
HIAGRDLFKYTVKPRDTDPDTFLKHIKKVIEKGYREKGQAIEYSGLTETQLRAATQLAI
YYFTDSAELDKDKLKDYHGFGDMNDSTLAVAKILVEYAQDSNPPQLTDLDFFIPNNN
KYQSLIGTQWHPEDLVDIIRMEDKKEVIPVTHNLTLRKTVTGLAGDRTKDFHFEIELK
NNKQELLSQTVKTDKTNLEFKDGKATINLKHGESLTLQGLPEGYSYLVKETDSEGYK
VKVNSQEVANATVSKTGITSDETLAFENNKEPVVPTGVDQKINGYLALIVIAGISLGIW
GIHTIRIRKHD; FCT-2_full
270:
MKQTLKLMFSFLLMLGTMFGISQTVLAQETHQLTIVHLEARDIDRPNPQLEIAPKEGTP
IEGVLYQLYQLKSTEDGDLLAHWNSLTITELKKQAQQVFEATTNQQGKATFNQLPDG
IYYGLAVKAGEKNRNVSAFLVDLSEDKVIYPKIIWSTGELDLLKVGVDGDTKKPLAG
VVFELYEKNGRTPIRVKNGVHSQDIDAAKHLETDSSGHIRISGLIHGDYVLKEIETQSG
YQIGQAETAVTIEKSKTVTVTIENKKVPTPKVPSRGGLIPKTGEQQAMALVIIGGILIAL
ALRLLSKHRKHQNKD; GBS52_Q8E0S8
271:
MLNRETHMKKVRKIFQKAVAGLCCISQLTAFSSIVALAETPETSPAIGKVVIKETGEGG
ALLGDAVFELKNNTDGTTVSQRTEAQTGEAIFSNIKPGTYTLTEAQPPVGYKPSTKQW
TVEVEKNGRTTVQGEQVENREEALSDQYPQTGTYPDVQTPYQIIKVDGSEKNGQHKA
LNPNPYERVIPEGTLSKRIYQVNNLDDNQYGIELTVSGKTVYEQKDKSVPLDVVILLD
NSNSMSNIRNKNARRAERAGEATRSLIDKITSDSENRVALVTYASTIFDGTEFTVEKGV
ADKNGKRENDSLFWNYDQTSFTTNTKDYSYLKLINDKNDIVELKNKVPTEAEDHDG
NRLMYQFGATFTQKALMKADEILTQQARQNSQKVIFHITDGVPTMSYPINFNHATFAP
SYQNQLNAFFSKSPNKDGILLSDFITQATSGEHTIVRGDGQSYQMFTDKTVYEKGAPA
AFPVKPEKYSEMKAAGYAVIGDPINGGYIWLNWRESILAYPENSNTAKITNHGDPTR
WYYNGNIAPDGYDVFTVGIGINGDPGTDEATATSFMQSISSKPENYTNVTDTTKILEQ
LNRYFHTIVTEKKSIENGTITDPMGELIDLQLGTDGRFDPADYTLTANDGSRLENGQA
VGGPQNDGGLLKNAKVLYDTTEKRIRVTGLYLGTDEKVTLTYNVRLNDEFVSNKFY
DTNGRTTLHPKEVEQNTVRDFPIPKIRDVRKYPEITISKEKKLGDIEFIKVNKNDKKPLR
GAVFSLQKQHPDYPDIYGAIDQNGTYQNVRTGEDGKLTFKNLSDGKYRLFENSEPAG
YKPVQNKPIVAFQIVNGEVRDVTSIVPQDIPAGYEFTNDKHYITNEPIPPKREYPRTGGI
GMLPFYLIGCMMMGGVLLYTRKHP; Rrga_AAK74622.1
272:
MKSINKFLTMLAALLLTASSLFSAATVFAAGTTTTSVTVHKLLATDGDMDKIANELET
GNYAGNKVGVLPANAKEIAGVMFVWTNTNNEIIDENGQTLGVNIDPQTFKLSGAMP
ATAMKKLTEAEGAKFNTANLPAAKYKIYEIHSLSTYVGEDGATLTGSKAVPIEIELPL
NDVVDAHVYPKNTEAKPKIDKDFKGKANPDTPRVDKDTPVNHQVGDVVEYEIVTKIP
ALANYATANWSDRMTEGLAFNKGTVKVTVDDVALEAGDYALTEVATGFDLKLTDA
GLAKVNDQNAEKTVKITYSATLNDKAIVEVPESNDVTFNYGNNPDHGNTPKPNKPNE
NGDLTLTKTWVDATGAPIPAGAEATFDLVNAQTGKVVQTVTLTTDKNTVTVNGLDK
NTEYKFVERSIKGYSADYQEITTAGEIAVKNWKDENPKPLDPTEPKVVTYGKKFVKV
NDKDNRLAGAEFVIANADNAGQYLARKADKVSQEEKQLVVTTKDALDRAVAAYNA
LTAQQQTQQEKEKVDKAQAAYNAAVIAANNAFEWVADKDNENVVKLVSDAQGRFE
ITGLLAGTYYLEETKQPAGYALLTSRQKFEVTATSYSATGQGIEYTAGSGKDDATKV
VNKKITIPQTGGIGTIIFAVAGAAIMGIAVYAYVKNNKDEDQLA;
Rrgb_WP_000836217.1
273:
MTMQKMQKMISRIFFVMALCFSLVWGAHAVQAQEDHTLVLQLENYQEVVSQLPSRD
GHRLQVWKLDDSYSYDDRVQIVRDLHSWDENKLSSFKKTSFEMTFLENQIEVSHIPN
GLYYVRSIIQTDAVSYPAEFLFEMTDQTVEPLVIVAKKTDTMTTKVKLIKVDQDHNRL
EGVGFKLVSVARDVSEKEVPLIGEYRYSSSGQVGRTLYTDKNGEIFVTNLPLGNYRFK
EVEPLAGYAVTTLDTDVQLVDHQLVTITVVNQKLPRGNVDFMKVDGRTNTSLQGAM
FKVMKEESGHYTPVLQNGKEVVVTSGKDGRFRVEGLEYGTYYLWELQAPTGYVQLT
SPVSFTIGKDTRKELVTVVKNNKRPRIDVPDTGEETLYILMLVAILLFGSGYYLTKKPN
N; Rrgc_WP_000178714.1
274:
MNFGFTRHRSQLSHAALPAVLFLAITSTAITTPVDATPITSTNIDTVVEDAAENPPLDQE
SAALPTEVTDDNLQHVKLIITNNMISAGFATIERKNGESEFYGHDQVLIDGTEVPDSSV
YSAPATENQGDLITINFAGLSIQSGQTISFSYRSSATSQNDTWLPSEANAFKYLAAPAES
AIANTDEREAQSFLQGNFELSMSVSPALVQVGQPVTYTYTFKNTSSRYRLFWSNYAD
GAKGVIEDRLNLNDDVKCKWDEGNGWLKSKTGQRYIDINSEATFSCVRTFEHVGNY
TNSVNIKEAKQRTGPLNGQIGLTLAPTTIDDALSVKVVNVVNSQTDPQWSLTISSSKFY
VDPSGEDVTYTYTVTNLSNDKIYYEALKHDVCSPIKIENSLQFDPENRKYYIPQNGTAT
WECATRINHETTGLVSGTFSDNKGNRSTVKASTQTKVKTPTLSNGTSYGIPRCDVIDF
TTVNKSTGIGTLGSIEQQNGQFKKIEQSNIFPEKGSPAHHDRRIKKKGRMTTASATSAQ
HPEYVYYAALALGDSISISSDANMGIYRIHKISGTVEKITAPHFSQSALQNNQRFGATL
TNRLAFDATGKLWSFAQDGHLYSLPMDGDGKAAGEWFDHGAVAGEAINGEGNAVG
FESLVFGDIAFDGNGAMWILGSIRGLTKEDTNGRVIKDEVDPTTYLFTLKPPRDNTPIT
EKVQIVQKITGVGTSIDQKGFFGLAFGVDGTLYGSYDTSGDGISDSPGELYSFNLRDG
KVTKVFSSPLMARVQDLSSCAFPAPRISAEKTAAHEVDKDTITYTITVRNSGNLEATGT
KFTDNLPGSYVPNSAKLNGKPIPDLPVNSTNPTGNPFHDGLYIKSPDAAPGTIDPQSEA
VIEMTINKLNSTNDGRVCNQAEINAVGQQVKTDDPTLPGHEDPTCVSVPISLKMSLKK
AIYDPSAQSPKILDNLGGAKFAIYARTDTGDLGELRKEVSDEEPFEISPGTYLLVETQSP
AGLSLLPKPVEFTITKSSSGFDVKSNSPLTVSFTKTDGIIVATVSDVKNGTLPKTGSTGF
LPFVFVGLSIIVLTALWVQRRSQYKL; SpaA_A0A5E5PJF1
275:
MKVKKTYGFRKSKISKTLCGAVLGTVAAVSVAGQKVFADETTTTSDVDTKVVGTQT
GNPATNLPEAQGSASKEAEQSQNQAGETNGSIPVEVPKTDLDQAAKDAKSAGVNVV
QDADVNKGTVKTABEAVQKETEIKEDYTKQAEDIKKTTDQYKSDVAAHEAEVAKIK
AKNQATKEQYEKDMAAHKAEVERINAANAASKTAYEAKLAQYQADLAAVQKTNA
ANQAAYQKALAAYQAELKRVQEANAAAKAAYDTAVAANNAKNTEIAAANEEIRKR
NATAKAEYETKLAQYQAELKRVQEANVANEADYQAKLTAYQTELARVQKANADA
KAAYEAAVAANNAKNAALTAENTAIKQRNENAKATYEAALKQYEADLAAAKKAN
AANEADYQAKLTAYQTELARVQKANADAKAAYEAAVAANNAANAALTAENTAIK
KRNADAKADYEAKLAKYQADLAKYQKDLADYPVKLKAYEDEQASIKAALAELEKH
KNEDGNLTEPSAQNLVYDLEPNANLSLTTDGKFLKASAVDDAFSKSTSKAKYDQKIL
QLDDLDITNLEQSNDVASSMELYGNFGDKAGWSTTVSNNSQVKWGSVLLERGQSAT
ATYTNLQNSYYNGKKISKIVYKYTVDPKSKFQGQKVWLGIFTDPTLGVFASAYTGQV
EKNTSIFIKNEFTFYDEDGKPINFDNALLSVASLNREHNSIEMAKDYSGKFVKISGSSIG
EKNGMIYATDTLNFKQGEGGSRWTMYKNSQAGSGWDSSDAPNSWYGAGAIKMSGP
NNHVTVGATSATNVMPVSDMPVVPGKDNTDGKKPNIWYSLNGKIRAVNVPKVTKE
KPTPPVKPTAPTKPTYETEKPLKPAPVAPNYEKEPTPPTRTPDQAEPNKPTPPTYETEKP
LEPAPVEPSYEAEPTPPTRTPDQAEPNKPTPPTYETEKPLEPAPVEPSYEAEPTPPTPTPD
QPEPNKPVEPTYEVIPTPPTDPVYQDLPTPPSVPTVHFHYFKLAVQPQVNKEIRNNNDV
NIDRTLVAKQSVVKFQLKTADLPAGRDETTSFVLVDPLPSGYQFNPEATKAASPGFDV
AYDNATNTVTFKATAATLATFNADLTKSVATIYPTVVGQVLNDGATYKNNFTLTVN
DAYGIKSNVVRVTTPGKPNDPDNPNNNYIKPTKVNKNENGVVIDGKTVLAGSTNYYE
LTWDLDQYKNDRSSADTIQKGFYYVDDYPEEALELRQDLVKITDANGNEVTGVSVD
NYTSLEAAPQEIRDVLSKAGIRPKGAFQIFRADNPREFYDTYVKTGIDLKIVSPMVVKK
QMGQTGGSYENQAYQIDFGNGYASNIVINNVPKINPKKDVTLTLDPADTNNVDGQTI
PLNTVFNYRLIGGIIPANHSEELFEYNFYDDYDQTGDHYTGQYKVFAKVDITLKNGVII
KSGTELTQYTTAEVDTTKGAITIKFKEAFLRSVSIDSAFQAESYIQMKRIAVGTFENTYI
NTVNGVTYSSNTVKTTTPEDPTDPTDPQDPSSPRTSTVINYKPQSTAYQPSSVQETLLN
TGVTNNAYMPLLGIIGLVTSFSLLGLKAKKD; SpaP_BAF91892.1
276:
MKLRHLLLTGAALTSFAATTVHGETVVNGAKLTVTKNLDLVNSNALIPNTDFTFKIEP
DTTVNEDGNKFKGVALNTPMTKVTYTNSDKGGSNTKTAEFDFSEVTFEKPGVYYYK
VTEEKIDKVPGVSYDTTSYTVQVHVLWNEEQQKPVATYIVGYKEGSKVPIQFKNSLD
STTLTVKKKVSGTGGDRSKDFNFGLTLKANQYYKASEKVMIEKTTKGGQAPVQTEAS
IDQLYHFTLKDGESIKVTNLPVGVDYVVTEDDYKSEKYTINVEVSPQDGAVKNIAGN
STEQETSTDKDMTITFTNKKDFEVPTGVAMTVAPYIALGIVAVGGALYFVKKKNA;
Spy0128
277:
MKNKKEVYGFRKSKVAKTLCGAVLGTALIAFADKAVFADEVTETTSTSTVEVATTG
NPATNLAEAQGDMSQAAKESQAKAGSKDSALPVEVSSADLDKAVADAKTAGVKVV
QDETKDKGTATTATENAQKQDEIKSDYAKQAEEIKTSTEAYKKAAATHQAETDKINA
ENKAADDKYQKDLKSHQEEVEKINTANATAKAEYEAKLAQYQKDLATVKKANEDS
QQDYQNKLSAYQTELARVQKANAEAKEAYEKAVKENTEKNEALQAENEAIKQRNET
AKANYDAAMKQYEADLAAIKKAKEDNDADYQAKLAAYQTELARVQKANADAKAA
YEKAVEENTAKNNAIQAENEAIKQRNATAKSTYDAAMKKYEADLVAVKQANATNE
TDYQTKLAAYQTELARVQKANADAKAAYEKAVEDNKAKNAALKAENEEIKQRNAV
AKTDYEAKLAKYEADLAKYKKEFAAYTAALAEAESKKKQDGYLSEPRSQSLNFKSE
PNAIRTIDPSVHQYGQQELDALVKSWGISPTNPDRTKSTAYSYFNAINSNNTYAKLVL
EKDKPVDVTYTGLKNSSFNGKKISKVVYTYTLKETGENDGTKMTMFASSDPTVTAW
YNDYFTSTNINVKVKFYDEEGQLMNLTGGLVNFSSLNRGNGSGAIDKDAIESVRNFN
GRYIPISGSSIKIHENNSAYADSSNAEKSLGARWNTSEWDTTSSPNNWYGAIVGEITQS
EISENMASSKSGNIWFAFNSNINAIGVPTKPVAPTAPTQPMYETEKPLEPAPVAPTYEN
EPTPPVKTPDQPEPSKPEEPKYETEKPLEPAPVAPSYENEPTPPEL; Sspb_EUC80876.1
*capable of intramolecular isopeptide bond formation from which isopeptide domain and isopeptide tag can isolated for the purpose of making fusion protein, peptide or conjugate that can participate in intermolecular isopeptide bond formation

TABLE 12
Signal Sequences

SEQ ID NO: Sequence; Source
278:
ATGTGGTGGCGACTCTGGTGGCTCCTTCTTCTGCTCCTTCTCCTTTGGCCAATGGTG
TGGGCC; Signal sequence-Coding sequence from secreted alkaline phosphatase [synthetic
construct] Sequence ID: BBD75655.1; Artificial Sequence
279: MWWRLWWLLLLLLLLWPMVWA; Signal sequence-Peptide sequence from
secreted alkaline phosphatase [synthetic construct] Sequence ID: BBD75655.1; Artificial
Sequence
280:
ATGGAAACGGATACGTTGCTGCTCTGGGTCCTGCTTCTTTGGGTTCCCGGGTCAAC
TGGTGAT; Signal sequence-Coding sequence from Igk protein [Mus musculus] Sequence
ID: AAH80787.1
281: METDTLLLWVLLLWVPGSTGD; Signal sequence-Peptide sequence from Igk protein
[Mus musculus] Sequence ID: AAH80787.1
282:
ATGGCAGTGGGGGCCAGTGGTCTAGAAGGAGATAAGATGGCTGGTGCCATGCCTC
TGCAACTCCTCCTGTTGCTGATCCTACTGGGCCCTGGCAACAGC; Signal sequence-
Coding sequence from NCBI Reference Sequence: NP_001193538.1; CCDS55881.1
283: MAVGASGLEGDKMAGAMPLQLLLLLILLGPGNS; Signal sequence-Peptide
sequence from NCBI Reference Sequence: NP_001193538.1
284:
ATGGAATCCAAGGGGGCCAGTTCCTGCCGTCTGCTCTTCTGCCTCTTGATCTCCGC
CACCGTCTTCAGGCCAGGCCTTGGA; Signal sequence-Coding sequence from NCBI
Reference Sequence: NP_001618.2; CCDS33810.1
285: MESKGASSCRLLFCLLISATVFRPGLG; Signal sequence-Peptide sequence from
NCBI Reference Sequence: NP_001618.2
286:
ATGGTCCTCCTTTGGCTCACGCTGCTCCTGATCGCCCTGCCCTGTCTCCTGCAAAC
G; Signal sequence-Coding sequence from NCBI Reference Sequence: XP_005274837.1;
CCDS59158.1
287: MVLLWLTLLLIALPCLLQT; Signal sequence-Peptide sequence from NCBI
Reference Sequence: XP 005274837.1

TABLE 13
Nucleic Acid Payload

| Class of payload | Payload details | Target |
|---|---|---|
| anti-miRNA | antimiR-494 | Targets the “oncomiR”, miR-494 |
| | | miRNA |
| anti-miRNA | antimiR-221/222 | Targets the “oncomiR”, miR-221/222 |
| | | miRNA |
| anti-miRNA | antimiR-132 | Targets the “oncomiR”, miR-132 |
| | | miRNA |
| anti-miRNA | antimiR-155 | Targets the “oncomiR”, miR-155 |
| | | miRNA |
| Antisense | ASO, OGX-011 | Clusterin |
| Oligonucleotide (ASO) | | |
| Antisense | EGFR antisense DNA | EGFR |
| Oligonucleotide (ASO) | | |
| Antisense | ASO, OGX-427 | Hsp27 |
| Oligonucleotide (ASO) | | |
| Antisense | ASO, ISIS-STAT3Rx | STAT3 |
| Oligonucleotide (ASO) | | |
| Antisense | ASO, AP 12009 | TGFB2 |
| Oligonucleotide (ASO) | | |
| Antisense | ASO, EZN-2968 | HIF-1a |
| Oligonucleotide (ASO) | | |
| Antisense | ASO, LErafAON-ETU | c-raf |
| Oligonucleotide (ASO) | | |
| Antisense | ASO, K-Ras mutation | Mutated K-Ras |
| Oligonucleotide (ASO) | matched | |
| Antisense | ASO, Wnt/beta-catenin | WNT/beta-catenin signaling |
| Oligonucleotide (ASO) | | |
| Antisense | ASO, myc | Estrogen induced c-myc expression |
| Oligonucleotide (ASO) | | |
| Antisense | ASO, Raf1 | Raf-1 |
| Oligonucleotide (ASO) | | |
| Aptamer | DNA Aptamer, AS1411 | Nucleolin |
| Aptamer | RNA Apatamer, NOX- | CXCL12/SDF-1 (CXC chemokine |
| | A12 | ligand 12/stromal cell derived factor-1) |
| CRISPR/Cas9 | CRISPR/Cas9 | E6, E7 HPV oncogenes |
| CRISPR/Cas9 | CRISPR/Cas9 | EBV genome, EBNA1 |
| CRISPR/Cas9 | CRISPR/Cas9 under an | sgRNA to LacI gene, only in the |
| | AND logic gate | presence of the cancer-specific human |
| | | telomerase reverse transcriptase |
| | | promoter and urothelium-specific |
| | | human uroplakin II promoter (AND |
| | | logic gate, both promotors only present |
| | | in bladder cancer cells). |
| Cytotoxic trans-genes | Herpes Simplex Type 1 | Converts the prodrug ganciclovir (or |
| | thymidine kinase (TK) | valacyclovir) into the highly toxic |
| | | deoxyguanosine triphosphate causing |
| | | early chain termination of nascent DNA |
| | | strands |
| miRNA | miRNA-34a | Poorly understood tumor suppressor |
| | | gene. Targets include SIRT1, BCL2, |
| | | YY1, MYC, CDK6, CCND1, FOXP1, |
| | | HNF4a, CDKN2C, ACSL4, LEF1, |
| | | ACSL1, MTA2, AXL, LDHA, HDAC1, |
| | | CD44, BCL2, E2F3 |
| miRNA | miR-200 | Poorly understood tumor suppressor |
| | | gene. Targets include ZEB1, CTNNB1, |
| | | BAP1, GEMIN2, PTPRD, WDR37, |
| | | KLF11, SEPT9, HOXB5, ERBB2IP. |
| | | KLHL20, FOG2, RIN2, RASSF2, |
| | | ELMO2, TCF7L1, VAC14, SHC1, |
| | | SEPT7, FOG2 |
| miRNA | miR-15/16 | Poorly understood tumor suppressor |
| | | gene. Targets include BACE1, DMTF1, |
| | | C22orf5, BCL2, ARL2, CCNT2, |
| | | TPPP3, VEGFA, RARS, FGF2, |
| | | ZNF622, DNAJB4, PURA, SHOC2, |
| | | LUZP1, FNDC3B, ITGA2, ATG9A, |
| | | CA12, TMEM43, YIF1B, TMEM189, |
| | | VTI1B, RTN4, TOMM34, NAA15, |
| | | PNP, SRPR, IPO4, NAPg, PFAH1B2, |
| | | SLC12A2, SEC24A, NOTCH2, |
| | | PPP2RSC, KCNN4, UBE4A, KPNA3, |
| | | RAB30, ACP2, SRPRB, EIF4E, |
| | | ABCF2, TPM3, ARHGDIA, GALNT7, |
| | | LYPLA2, CHORDC1, TMEM109, |
| | | LAMC1, EGFR, GPAM, ADSS, PPIF, |
| | | RFT1, TNFSF9, IGF2R, TXN2, |
| | | GFPT1, SLC7A1, SQSTM1, PANX1, |
| | | UTP15, NPR3, SLC16A3, PTGS2, |
| | | HARS, LAMTOR3, HSPA1B |
| miRNA | let-7 | Poorly understood tumor suppressor |
| | | gene. Targets include NIRF, NF2, |
| | | CASP3, TRIM71 |
| miRNA | miR-26a | Induces cell-cycle arrest associated with |
| | | direct targeting of cyclins D2 and E2 |
| miRNA | miR-143 | MACC1 |
| miRNA | miR-145; miR-33a | ERK5, c-Myc |
| mRNA | mRNAs encoding | OX40L, IL-36γ, and IL-23 |
| | OX40L, IL-36γ, and | |
| | IL-23 | |
| siRNA | siRNA against targets | Knockdown c-Myc/MDM2/VEGF |
| siRNA | siRNA against targets | EphA2 oncoprotein |
| siRNA | siRNA against targets | Oncogenic KRAS(G12D) |
| siRNA | siRNA against targets | PLK1 (polo-like kinase-1) |
| siRNA | siRNA against targets | protein kinase N3 (PKN3) gene |
| | | expression in vascular endothelial cells |
| siRNA | siRNA against targets | VEGF gene, kinesin spindle (KSP) |
| | | protein gene |
| Splice-switching | SSO to Bcl-x | Apoptotic regulator Bcl-x is |
| oligonucleotides (SSOs) | | alternatively spliced to express anti- |
| | | apoptotic Bcl-xL and pro-apoptotic Bcl- |
| | | xS |
| Splice-switching | SSO, SSO111 | HER2 Exon 15, transmembrane |
| oligonucleotides (SSOs) | | domain. |
| Transgene encoding | Pseudomonas exotoxin | IL12 variant, IL13Rα2, common in |
| toxic proteins | encoded transgene | GBM |
| | connected to human IL- | |
| | 13. 50-80% of human | |
| | GBM cells overexpress | |
| | a variant of the IL-13 | |
| | receptor not found in | |
| | normal tissue. | |

The application's sequence listing, which the Patent Office published only in electronic form, follows.

SEQUENCE LISTING (287 sequences)

SEQ ID NO: 1 - DNA, 348 bp, Artificial Sequence
  Isopeptide domain
  CDS (1)..(348)
ggcgccatggtggacaccctgagcggcctgagcagcgagcagggccagagcggcgacatgaccatcgaggaggacagcgccacccacatcaagttcagcaagagagacgaggacggcaaggagctggccggcgccaccatggagctgagagacagcagcggcaagaccatcagcacctggatcagcgacggccaggtgaaggacttctacctgtaccccggcaagtacaccttcgtggagaccgccgcccccgacggctacgaggtggccaccgccatcaccttcaccgtgaacgagcagggccaggtgaccgtgaacggcaaggccaccaagggcgacgcccacatc

SEQ ID NO: 2 - protein, 116 aa, Artificial Sequence
  Synthetic Construct
GAMVDTLSGLSSEQGQSGDMTIEEDSATHIKFSKRDEDGKELAGATMELRDSSGKTISTWISDGQVKDFYLYPGKYTFVETAAPDGYEVATAITFTVNEQGQVTVNGKATKGDAHI

SEQ ID NO: 3 - DNA, 345 bp, Artificial Sequence
  Isopeptide domain
  CDS (1)..(345)
gccatggtggacaccctgagcggcctgagcagcgagcagggccagagcggcgacatgaccatcgaggaggacagcgccacccacatcaagttcagcaagagagacgaggacggcaaggagctggccggcgccaccatggagctgagagacagcagcggcaagaccatcagcacctggatcagcgacggccaggtgaaggacttctacctgtaccccggcaagtacaccttcgtggagaccgccgcccccgacggctacgaggtggccaccgccatcaccttcaccgtgaacgagcagggccaggtgaccgtgaacggcaaggccaccaagggcgacgcccacatc

SEQ ID NO: 4 - protein, 115 aa, Artificial Sequence
  Synthetic Construct
AMVDTLSGLSSEQGQSGDMTIEEDSATHIKFSKRDEDGKELAGATMELRDSSGKTISTWISDGQVKDFYLYPGKYTFVETAAPDGYEVATAITFTVNEQGQVTVNGKATKGDAHI

SEQ ID NO: 5 - DNA, 342 bp, Artificial Sequence
  Isopeptide domain
  CDS (1)..(342)
atggtggacaccctgagcggcctgagcagcgagcagggccagagcggcgacatgaccatcgaggaggacagcgccacccacatcaagttcagcaagagagacgaggacggcaaggagctggccggcgccaccatggagctgagagacagcagcggcaagaccatcagcacctggatcagcgacggccaggtgaaggacttctacctgtaccccggcaagtacaccttcgtggagaccgccgcccccgacggctacgaggtggccaccgccatcaccttcaccgtgaacgagcagggccaggtgaccgtgaacggcaaggccaccaagggcgacgcccacatc

SEQ ID NO: 6 - protein, 114 aa, Artificial Sequence
  Synthetic Construct
MVDTLSGLSSEQGQSGDMTIEEDSATHIKFSKRDEDGKELAGATMELRDSSGKTISTWISDGQVKDFYLYPGKYTFVETAAPDGYEVATAITFTVNEQGQVTVNGKATKGDAHI

SEQ ID NO: 7 - DNA, 339 bp, Artificial Sequence
  Isopeptide domain
  CDS (1)..(339)
gtggacaccctgagcggcctgagcagcgagcagggccagagcggcgacatgaccatcgaggaggacagcgccacccacatcaagttcagcaagagagacgaggacggcaaggagctggccggcgccaccatggagctgagagacagcagcggcaagaccatcagcacctggatcagcgacggccaggtgaaggacttctacctgtaccccggcaagtacaccttcgtggagaccgccgcccccgacggctacgaggtggccaccgccatcaccttcaccgtgaacgagcagggccaggtgaccgtgaacggcaaggccaccaagggcgacgcccacatc

SEQ ID NO: 8 - protein, 113 aa, Artificial Sequence
  Synthetic Construct
VDTLSGLSSEQGQSGDMTIEEDSATHIKFSKRDEDGKELAGATMELRDSSGKTISTWISDGQVKDFYLYPGKYTFVETAAPDGYEVATAITFTVNEQGQVTVNGKATKGDAHI

SEQ ID NO: 9 - DNA, 342 bp, Artificial Sequence
  Isopeptide domain
  CDS (1)..(342)
gtggacaccctgagcggcctgagcagcgagcagggccagagcggcgacatgaccatcgaggaggacagcgccacccacatcaagttcagcaagagagacgaggacggcaaggagctggccggcgccaccatggagctgagagacagcagcggcaagaccatcagcacctggatcagcgacggccaggtgaaggacttctacctgtaccccggcaagtacaccttcgtggagaccgccgcccccgacggctacgaggtggccaccgccatcaccttcaccgtgaacgagcagggccaggtgaccgtgaacggcaaggccaccaagggcgacgcccacatcgac

SEQ ID NO: 10 - protein, 114 aa, Artificial Sequence
  Synthetic Construct
VDTLSGLSSEQGQSGDMTIEEDSATHIKFSKRDEDGKELAGATMELRDSSGKTISTWISDGQVKDFYLYPGKYTFVETAAPDGYEVATAITFTVNEQGQVTVNGKATKGDAHID

SEQ ID NO: 11 - DNA, 327 bp, Artificial Sequence
  Isopeptide domain
  CDS (1)..(327)
gtggacaccctgagcggcctgagcagcgagcagggccagagcggcgacatgaccatcgaggaggacagcgccacccacatcaagttcagcaagagagacgaggacggcaaggagctggccggcgccaccatggagctgagagacagcagcggcaagaccatcagcacctggatcagcgacggccaggtgaaggacttctacctgtaccccggcaagtacaccttcgtggagaccgccgcccccgacggctacgaggtggccaccgccatcaccttcaccgtgaacgagcagggccaggtgaccgtgaacggcaaggccaccaagggc

SEQ ID NO: 12 - protein, 109 aa, Artificial Sequence
  Synthetic Construct
VDTLSGLSSEQGQSGDMTIEEDSATHIKFSKRDEDGKELAGATMELRDSSGKTISTWISDGQVKDFYLYPGKYTFVETAAPDGYEVATAITFTVNEQGQVTVNGKATKG

SEQ ID NO: 13 - DNA, 324 bp, Artificial Sequence
  Isopeptide domain
  CDS (1)..(324)
gtggacaccctgagcggcctgagcagcgagcagggccagagcggcgacatgaccatcgaggaggacagcgccacccacatcaagttcagcaagagagacgaggacggcaaggagctggccggcgccaccatggagctgagagacagcagcggcaagaccatcagcacctggatcagcgacggccaggtgaaggacttctacctgtaccccggcaagtacaccttcgtggagaccgccgcccccgacggctacgaggtggccaccgccatcaccttcaccgtgaacgagcagggccaggtgaccgtgaacggcaaggccaccaag

SEQ ID NO: 14 - protein, 108 aa, Artificial Sequence
  Synthetic Construct
VDTLSGLSSEQGQSGDMTIEEDSATHIKFSKRDEDGKELAGATMELRDSSGKTISTWISDGQVKDFYLYPGKYTFVETAAPDGYEVATAITFTVNEQGQVTVNGKATK

SEQ ID NO: 15 - DNA, 333 bp, Artificial Sequence
  Isopeptide domain
  CDS (1)..(333)
gtggacaccctgagcggcctgagcagcgagcagggccagagcggcgacatgaccatcgaggaggacagcgccacccacatcaagttcagcaagagagacgaggacggcaaggagctggccggcgccaccatggagctgagagacagcagcggcaagaccatcagcacctggatcagcgacggccaggtgaaggacttctacctgtaccccggcaagtacaccttcgtggagaccgccgcccccgacggctacgaggtggccaccgccatcaccttcaccgtgaacgagcagggccaggtgaccgtgaacggcaaggccaccaagggcgacgcc

SEQ ID NO: 16 - protein, 111 aa, Artificial Sequence
  Synthetic Construct
VDTLSGLSSEQGQSGDMTIEEDSATHIKFSKRDEDGKELAGATMELRDSSGKTISTWISDGQVKDFYLYPGKYTFVETAAPDGYEVATAITFTVNEQGQVTVNGKATKGDA

SEQ ID NO: 17 - DNA, 336 bp, Artificial Sequence
  Isopeptide domain
  CDS (1)..(336)
gtggacaccctgagcggcctgagcagcgagcagggccagagcggcgacatgaccatcgaggaggacagcgccacccacatcaagttcagcaagagagacgaggacggcaaggagctggccggcgccaccatggagctgagagacagcagcggcaagaccatcagcacctggatcagcgacggccaggtgaaggacttctacctgtaccccggcaagtacaccttcgtggagaccgccgcccccgacggctacgaggtggccaccgccatcaccttcaccgtgaacgagcagggccaggtgaccgtgaacggcaaggccaccaagggcgacgcccac

SEQ ID NO: 18 - protein, 112 aa, Artificial Sequence
  Synthetic Construct
VDTLSGLSSEQGQSGDMTIEEDSATHIKFSKRDEDGKELAGATMELRDSSGKTISTWISDGQVKDFYLYPGKYTFVETAAPDGYEVATAITFTVNEQGQVTVNGKATKGDAH

SEQ ID NO: 19 - DNA, 336 bp, Artificial Sequence
  Isopeptide domain
  CDS (1)..(336)
gacaccctgagcggcctgagcagcgagcagggccagagcggcgacatgaccatcgaggaggacagcgccacccacatcaagttcagcaagagagacgaggacggcaaggagctggccggcgccaccatggagctgagagacagcagcggcaagaccatcagcacctggatcagcgacggccaggtgaaggacttctacctgtaccccggcaagtacaccttcgtggagaccgccgcccccgacggctacgaggtggccaccgccatcaccttcaccgtgaacgagcagggccaggtgaccgtgaacggcaaggccaccaagggcgacgcccacatc

SEQ ID NO: 20 - protein, 112 aa, Artificial Sequence
  Synthetic Construct
DTLSGLSSEQGQSGDMTIEEDSATHIKFSKRDEDGKELAGATMELRDSSGKTISTWISDGQVKDFYLYPGKYTFVETAAPDGYEVATAITFTVNEQGQVTVNGKATKGDAHI

SEQ ID NO: 21 - DNA, 276 bp, Artificial Sequence
  Isopeptide domain
  CDS (1)..(276)
gacagcgccacccacatcaagttcagcaagagagacgaggacggcaaggagctggccggcgccaccatggagctgagagacagcagcggcaagaccatcagcacctggatcagcgacggccaggtgaaggacttctacctgtaccccggcaagtacaccttcgtggagaccgccgcccccgacggctacgaggtggccaccgccatcaccttcaccgtgaacgagcagggccaggtgaccgtgaacggcaaggccaccaagggcgacgcccacatc

SEQ ID NO: 22 - protein, 92 aa, Artificial Sequence
  Synthetic Construct
DSATHIKFSKRDEDGKELAGATMELRDSSGKTISTWISDGQVKDFYLYPGKYTFVETAAPDGYEVATAITFTVNEQGQVTVNGKATKGDAHI

SEQ ID NO: 23 - DNA, 342 bp, Artificial Sequence; identical to SEQ ID NO: 9
  Isopeptide domain
  CDS (1)..(342)

SEQ ID NO: 24 - protein, 114 aa, Artificial Sequence; identical to SEQ ID NO: 10
  Synthetic Construct

SEQ ID NO: 25 - DNA, 348 bp, Artificial Sequence
  Isopeptide domain
  CDS (1)..(348)
gccatggtggacaccctgagcggcctgagcagcgagcagggccagagcggcgacatgaccatcgaggaggacagcgccacccacatcaagttcagcaagagagacgaggacggcaaggagctggccggcgccaccatggagctgagagacagcagcggcaagaccatcagcacctggatcagcgacggccaggtgaaggacttctacctgtaccccggcaagtacaccttcgtggagaccgccgcccccgacggctacgaggtggccaccgccatcaccttcaccgtgaacgagcagggccaggtgaccgtgaacggcaaggccaccaagggcgacgcccacatcgac

SEQ ID NO: 26 - protein, 116 aa, Artificial Sequence
  Synthetic Construct
AMVDTLSGLSSEQGQSGDMTIEEDSATHIKFSKRDEDGKELAGATMELRDSSGKTISTWISDGQVKDFYLYPGKYTFVETAAPDGYEVATAITFTVNEQGQVTVNGKATKGDAHID

SEQ ID NO: 27 - DNA, 315 bp, Artificial Sequence
  Isopeptide domain
  CDS (1)..(315)
gtggacaccctgagcagactgagcagcgagcagggccagagcggcgacatgaccatcgaggaggacagcgccacccacatcaagttcagcaagagagacgaggacggcaaggagctggccggcgccaccatggagctgagagacagcagcggcaagaccatcagcacctggatcagcgacggccaggtgaaggacttctacctgtaccccggcaagtacaccttctgcagaaacagaagcaccagaagatacggcggcagcaccgccatcccctacagcatggagcagggccaggtgaccgtgatggccagcaac

SEQ ID NO: 28 - protein, 105 aa, Artificial Sequence
  Synthetic Construct
VDTLSRLSSEQGQSGDMTIEEDSATHIKFSKRDEDGKELAGATMELRDSSGKTISTWISDGQVKDFYLYPGKYTFCRNRSTRRYGGSTAIPYSMEQGQVTVMASN

SEQ ID NO: 29 - DNA, 261 bp, Artificial Sequence
  Isopeptide domain
  CDS (1)..(261)
gacagcgccacccacatcaagttcagcaagagagacgaggacggcaaggagctggccggcgccaccatggagctgagagacagcagcggcaagaccatcagcacctggatcagcgacggccaggtgaaggacttctacctgtaccccggcaagtacaccttcgtggagaccgccgcccccgacggctacgaggtggccaccgccatcaccttcaccgtgaacgagcagggccaggtgaccgtgaacggcaaggccaccaag

SEQ ID NO: 30 - protein, 87 aa, Artificial Sequence
  Synthetic Construct
DSATHIKFSKRDEDGKELAGATMELRDSSGKTISTWISDGQVKDFYLYPGKYTFVETAAPDGYEVATAITFTVNEQGQVTVNGKATK

SEQ ID NO: 31 - DNA, 249 bp, Artificial Sequence
  Isopeptide domain
  CDS (1)..(249)
gacagcgccacccacatcaagttcagcaagagagacgaggacggcaaggagctggccggcgccaccatggagctgagagacagcagcggcaagaccatcagcacctggatcagcgacggccaggtgaaggacttctacctgtaccccggcaagtacaccttcgtggagaccgccgcccccgacggctacgaggtggccaccgccatcaccttcaccgtgaacgagcagggccaggtgaccgtgaacggc

SEQ ID NO: 32 - protein, 83 aa, Artificial Sequence
  Synthetic Construct
DSATHIKFSKRDEDGKELAGATMELRDSSGKTISTWISDGQVKDFYLYPGKYTFVETAAPDGYEVATAITFTVNEQGQVTVNG

SEQ ID NO: 33 - DNA, 276 bp, Artificial Sequence; identical to SEQ ID NO: 21
  Isopeptide domain
  CDS (1)..(276)

SEQ ID NO: 34 - protein, 92 aa, Artificial Sequence; identical to SEQ ID NO: 22
  Synthetic Construct

SEQ ID NO: 35 - DNA, 291 bp, Artificial Sequence
  Isopeptide domain
  CDS (1)..(291)
gacagcgccacccacatcaagttcagcaagagagacatcgacggcaaggagctggccggcgccaccatggagctgagagacagcagcggcaagaccatcagcacctggatcagcgacggccaggtgaaggacttctacctgatgcccggcaagtacaccttcgtggagaccgccgcccccgacggctacgaggtggccaccgccatcaccttcaccgtgaacgagcagggccaggtgaccgtgaacggcaaggccaccaagggcgacgcccacgccgtgatggtggccgcc

SEQ ID NO: 36 - protein, 97 aa, Artificial Sequence
  Synthetic Construct
DSATHIKFSKRDIDGKELAGATMELRDSSGKTISTWISDGQVKDFYLMPGKYTFVETAAPDGYEVATAITFTVNEQGQVTVNGKATKGDAHAVMVAA

SEQ ID NO: 37 - DNA, 264 bp, Artificial Sequence
  Isopeptide domain
  CDS (1)..(264)
gacagcgccacccacatcaagttcagcaagagagacgaggacggcaaggagctggccggcgccaccatggagctgagagacagcagcggcaagaccatcagcacctggatcagcgacggccaggtgaaggacttctacctgtaccccggcaagtacaccttcgtggagaccgccgcccccgacggctacgaggtggccaccgccatcaccttcaccgtgaacgagcagggccaggtgaccgtgaacggcaaggccaccaagggc

SEQ ID NO: 38 - protein, 88 aa, Artificial Sequence
  Synthetic Construct
DSATHIKFSKRDEDGKELAGATMELRDSSGKTISTWISDGQVKDFYLYPGKYTFVETAAPDGYEVATAITFTVNEQGQVTVNGKATKG

SEQ ID NO: 39 - DNA, 318 bp, Artificial Sequence
  Isopeptide domain
  CDS (1)..(318)
gtggacaccctgagcggcctgagcagcgagcagggccagagcggcgacatgaccatcgaggaggacagcgccacccacatcaagttcagcaagagagacgaggacggcaaggagctggccggcgccaccatggagctgagagacagcagcggcaagaccatcagcacctggatcagcgacggccaggtgaaggacttctacctgtaccccggcaagtacaccttcgtggagaccgccgcccccgacggctacgaggtggccaccgccatcaccttcaccgtgaacgagcagggccaggtgaccgtgaacggcctggag

SEQ ID NO: 40 - protein, 106 aa, Artificial Sequence
  Synthetic Construct
VDTLSGLSSEQGQSGDMTIEEDSATHIKFSKRDEDGKELAGATMELRDSSGKTISTWISDGQVKDFYLYPGKYTFVETAAPDGYEVATAITFTVNEQGQVTVNGLE

SEQ ID NO: 41 - DNA, 327 bp, Artificial Sequence
  Isopeptide domain
  CDS (1)..(327)
atggtggacaccctgagcggcctgagcagcgagcagggccagagcggcgacatgaccatcgaggaggacagcgccacccacatcaagttcagcaagagagacgaggacggcaaggagctggccggcgccaccatggagctgagagacagcagcggcaagaccatcagcacctggatcagcgacggccaggtgaaggacttctacctgtaccccggcaagtacaccttcgtggagaccgccgcccccgacggctacgaggtggccaccgccatcaccttcaccgtgaacgagcagggccaggtgaccgtgaacggcaaggccaccaag

SEQ ID NO: 42 - protein, 109 aa, Artificial Sequence
  Synthetic Construct
MVDTLSGLSSEQGQSGDMTIEEDSATHIKFSKRDEDGKELAGATMELRDSSGKTISTWISDGQVKDFYLYPGKYTFVETAAPDGYEVATAITFTVNEQGQVTVNGKATK

SEQ ID NO: 43 - DNA, 327 bp, Artificial Sequence; identical to SEQ ID NO: 11
  Isopeptide domain
  CDS (1)..(327)

SEQ ID NO: 44 - protein, 109 aa, Artificial Sequence; identical to SEQ ID NO: 12
  Synthetic Construct

SEQ ID NO: 45 - DNA, 339 bp, Artificial Sequence
  Isopeptide domain
  CDS (1)..(339)
gtgaccaccctgagcggcctgagcggcgagcagggccccagcggcgacatgaccaccgaggaggacagcgccacccacatcaagttcagcaagagagacgaggacggcagagagctggccggcgccaccatggagctgagagacagcagcggcaagaccatcagcacctggatcagcgacggccacgtgaaggacttctacctgtaccccggcaagtacaccttcgtggagaccgccgcccccgacggctacgaggtggccaccgccatcaccttcaccgtgaacgagcagggccaggtgaccgtgaacggcgaggccaccaagggcgacgcccacacc

SEQ ID NO: 46 - protein, 113 aa, Artificial Sequence
  Synthetic Construct
VTTLSGLSGEQGPSGDMTTEEDSATHIKFSKRDEDGRELAGATMELRDSSGKTISTWISDGHVKDFYLYPGKYTFVETAAPDGYEVATAITFTVNEQGQVTVNGEATKGDAHT

SEQ ID NO: 47 - DNA, 255 bp, Artificial Sequence
  Isopeptide domain
  CDS (1)..(255)
atgaccatcgaggaggacagcgccacccacatcaagttcagcaagagagacgaggacggcaaggagctggccggcgccaccatggagctgagagacagcagcggcaagaccatcagcacctggatcagcgacggccaggtgaaggacttctacctgtaccccggcaagtacaccttcgtggagaccgccgcccccgacggctacgaggtggccaccgccatcaccttcaccgtgaacgagcagggccaggtgacc

SEQ ID NO: 48 - protein, 85 aa, Artificial Sequence
  Synthetic Construct
MTIEEDSATHIKFSKRDEDGKELAGATMELRDSSGKTISTWISDGQVKDFYLYPGKYTFVETAAPDGYEVATAITFTVNEQGQVT

SEQ ID NO: 49 - DNA, 321 bp, Artificial Sequence
  Isopeptide domain
  CDS (1)..(321)
atcgagaccgagcagaacctgcccaacgaggacggccagagcggcaacatcatcgagcaggaggacagcaagaccctggtgaagttcagcaagagagacatcaagggcaacgagctggccggcgccaccatcgagctgagagacctgagcggcaagagcatccagagctgggtgagcgacggcaaggccaaggacttctacctgctgcccggcagctacgagttcgtggagaccgccgcccccgagggctaccagatcgccaccaagatcatgttcaccatcagcaccgacggcagaatcaccgtggacggccagctggtg

SEQ ID NO: 50 - protein, 107 aa, Artificial Sequence
  Synthetic Construct
IETEQNLPNEDGQSGNIIEQEDSKTLVKFSKRDIKGNELAGATIELRDLSGKSIQSWVSDGKAKDFYLLPGSYEFVETAAPEGYQIATKIMFTISTDGRITVDGQLV

SEQ ID NO: 51 - DNA, 270 bp, Artificial Sequence
  Isopeptide domain
  CDS (1)..(270)
gaggaggacagcgccacccacatcaagttcagcaagagagacgaggacggcaaggagctggccggcgccaccatggagctgagagacagcagcggcaagaccatcagcacctggatcagcgacggccaggtgaaggacttctacctgtaccccggcaagtacaccttcgtggagaccgccgcccccgacggctacgaggtggccaccgccatcaccttcaccgtgaacgagcagggccaggtgaccgtgaacggcaaggccaccaagggc

SEQ ID NO: 52 - protein, 90 aa, Artificial Sequence
  Synthetic Construct
EEDSATHIKFSKRDEDGKELAGATMELRDSSGKTISTWISDGQVKDFYLYPGKYTFVETAAPDGYEVATAITFTVNEQGQVTVNGKATKG

SEQ ID NO: 53 - DNA, 339 bp, Artificial Sequence; identical to SEQ ID NO: 45
  Isopeptide domain
  CDS (1)..(339)

SEQ ID NO: 54 - protein, 113 aa, Artificial Sequence; identical to SEQ ID NO: 46
  Synthetic Construct

SEQ ID NO: 55 - DNA, 336 bp, Artificial Sequence
  Isopeptide domain
  CDS (1)..(336)
aagcccctgagaggcgccgtgttcagcctgcagaagcagcaccccgactaccccgacatctacggcgccatcgaccagaacggcacctaccagaacgtgagaaccggcgaggacggcaagctgaccttcaagaacctgagcgacggcaagtacagactgttcgagaacagcgagcccgccggctacaagcccgtgcagaacaagcccatcgtggccttccagatcgtgaacggcgaggtgagagacgtgaccagcatcgtgccccaggacatccccgccacctacgagttcaccaacggcaagcactacatcaccaacgagcccatcccccccaag

SEQ ID NO: 56 - protein, 112 aa, Artificial Sequence
  Synthetic Construct
KPLRGAVFSLQKQHPDYPDIYGAIDQNGTYQNVRTGEDGKLTFKNLSDGKYRLFENSEPAGYKPVQNKPIVAFQIVNGEVRDVTSIVPQDIPATYEFTNGKHYITNEPIPPK

SEQ ID NO: 57 - DNA, 348 bp, Artificial Sequence
  Isopeptide domain
  CDS (1)..(348)
ggcagccacatgaagcccctgagaggcgccgtgttcagcctgcagaagcagcaccccgactaccccgacatctacggcgccatcgaccagaacggcacctaccagaacgtgagaaccggcgaggacggcaagctgaccttcaagaacctgagcgacggcaagtacagactgttcgagaacagcgagcccgccggctacaagcccgtgcagaacaagcccatcgtggccttccagatcgtgaacggcgaggtgagagacgtgaccagcatcgtgccccaggacatccccgccacctacgagttcaccaacggcaagcactacatcaccaacgagcccatcccccccaag

SEQ ID NO: 58 - protein, 116 aa, Artificial Sequence
  Synthetic Construct
GSHMKPLRGAVFSLQKQHPDYPDIYGAIDQNGTYQNVRTGEDGKLTFKNLSDGKYRLFENSEPAGYKPVQNKPIVAFQIVNGEVRDVTSIVPQDIPATYEFTNGKHYITNEPIPPK

SEQ ID NO: 59 - DNA, 372 bp, Artificial Sequence
  Isopeptide domain
  CDS (1)..(372)
agcagcggcctggtgcccagaggcagccacatggccagcatgaccggcggccagcagatgggcagaggcagcagcggcctgagcggcgagaccggccagagcggcaacaccaccatcgaggaggacagcaccacccacgtgaagttcagcaagagagacgccaacggcaaggagctggccggcgccatgatcgagctgagaaacctgagcggccagaccatccagagctggatcagcgacggcaccgtgaaggtgttctacctgatgcccggcacctaccagttcgtggagaccgccgcccccgagggctacgagctggccgcccccatcaccttcaccatcgacgagaagggccagatctgggtggacagc

SEQ ID NO: 60 - protein, 124 aa, Artificial Sequence
  Synthetic Construct
SSGLVPRGSHMASMTGGQQMGRGSSGLSGETGQSGNTTIEEDSTTHVKFSKRDANGKELAGAMIELRNLSGQTIQSWISDGTVKVFYLMPGTYQFVETAAPEGYELAAPITFTIDEKGQIWVDS

SEQ ID NO: 61 - DNA, 39 bp, Artificial Sequence
  Isopeptide tag
  CDS (1)..(39)
gcccacatcgtgatggtggacgcctacaagcccaccaag

SEQ ID NO: 62 - protein, 13 aa, Artificial Sequence
  Synthetic Construct
AHIVMVDAYKPTK

SEQ ID NO: 63 - DNA, 36 bp, Artificial Sequence
  Isopeptide tag
  CDS (1)..(36)
aagctgggcgacatcgagttcatcaaggtgaacaag

SEQ ID NO: 64 - protein, 12 aa, Artificial Sequence
  Synthetic Construct
KLGDIEFIKVNK

SEQ ID NO: 65 - DNA, 39 bp, Artificial Sequence
  Isopeptide tag
  CDS (1)..(39)
gaccccatcgtgatgatcgacaacgacaagcccatcacc

SEQ ID NO: 66 - protein, 13 aa, Artificial Sequence
  Synthetic Construct
DPIVMIDNDKPIT

SEQ ID NO: 67 - DNA, 2247 bp, Homo sapiens
  CDS (1)..(2247)
atggtgttgctgagagtgttaattctgctcctctcctgggcggcggggatgggaggtcagtatgggaatcctttaaataaatatatcagacattatgaaggattatcttacaatgtggattcattacaccaaaaacaccagcgtgccaaaagagcagtctcacatgaagaccaatttttacgtctagatttccatgcccatggaagacatttcaacctacgaatgaagagggacacttcccttttcagtgatgaatttaaagtagaaacatcaaataaagtacttgattatgatacctctcatatttacactggacatatttatggtgaagaaggaagttttagccatgggtctgttattgatggaagatttgaaggattcatccagactcgtggtggcacattttatgttgagccagcagagagatatattaaagaccgaactctgccatttcactctgtcatttatcatgaagatgatattaactatccccataaatacggtcctcaggggggctgtgcagatcattcagtatttgaaagaatgaggaaataccagatgactggtgtagaggaagtaacacagatacctcaagaagaacatgctgctaatggtccagaacttctgaggaaaaaacgtacaacttcagctgaaaaaaatacttgtcagctttatattcagactgatcatttgttctttaaatattacggaacacgagaagctgtgattgcccagatatccagtcatgttaaagcgattgatacaatttaccagaccacagacttctccggaatccgtaacatcagtttcatggtgaaacgcataagaatcaatacaactgctgatgagaaggaccctacaaatcctttccgtttcccaaatattggtgtggagaagtttctggaattgaattctgagcagaatcatgatgactactgtttggcctatgtcttcacagaccgagattttgatgatggcgtacttggtctggcttgggttggagcaccttcaggaagctctggaggaatatgtgaaaaaagtaaactctattcagatggtaagaagaagtccttaaacactggaattattactgttcagaactatgggtctcatgtacctcccaaagtctctcacattacttttgctcacgaagttggacataactttggatccccacatgattctggaacagagtgcacaccaggagaatctaagaatttgggtcaaaaagaaaatggcaattacatcatgtatgcaagagcaacatctggggacaaacttaacaacaataaattctcactctgtagtattagaaatataagccaagttcttgagaagaagagaaacaactgttttgttgaatctggccaacctatttgtggaaatggaatggtagaacaaggtgaagaatgtgattgtggctatagtgaccagtgtaaagatgaatgctgcttcgatgcaaatcaaccagagggaagaaaatgcaaactgaaacctgggaaacagtgcagtccaagtcaaggtccttgttgtacagcacagtgtgcattcaagtcaaagtctgagaagtgtcgggatgattcagactgtgcaagggaaggaatatgtaatggcttcacagctctctgcccagcatctgaccctaaaccaaacttcacagactgtaataggcatacacaagtgtgcattaatgggcaatgtgcaggttctatctgtgagaaatatggcttagaggagtgtacgtgtgccagttctgatggcaaagatgataaagaattatgccatgtatgctgtatgaagaaaatggacccatcaacttgtgccagtacagggtctgtgcagtggagtaggcacttcagtggtcgaaccatcaccctgcaacctggatccccttgcaacgattttagaggttactgtgatgttttcatgcggtgcagattagtagatgctgatggtcctctagctaggcttaaaaaagcaatttttagtccagagctctatgaaaacattgctgaatggattgtggctcattggtgggcagtattacttatgggaattgctctgatcatgctaatggctggatttattaagatatgcagtgttcatactccaagtagtaatccaaagttgcctcctcctaaaccacttccaggcactttaaagaggaggagacctccacagcccattcagcaaccccagcgtcagcggccccgagagagttatcaaatgggacacatgagacgctaa

SEQ ID NO: 68 - protein, 748 aa, Homo sapiens
MVLLRVLILLLSWAAGMGGQYGNPLNKYIRHYEGLSYNVDSLHQKHQRAKRAVSHEDQFLRLDFHAHGRHFNLRMKRDTSLFSDEFKVETSNKVLDYDTSHIYTGHIYGEEGSFSHGSVIDGRFEGFIQTRGGTFYVEPAERYIKDRTLPFHSVIYHEDDINYPHKYGPQGGCADHSVFERMRKYQMTGVEEVTQIPQEEHAANGPELLRKKRTTSAEKNTCQLYIQTDHLFFKYYGTREAVIAQISSHVKAIDTIYQTTDFSGIRNISFMVKRIRINTTADEKDPTNPFRFPNIGVEKFLELNSEQNHDDYCLAYVFTDRDFDDGVLGLAWVGAPSGSSGGICEKSKLYSDGKKKSLNTGIITVQNYGSHVPPKVSHITFAHEVGHNFGSPHDSGTECTPGESKNLGQKENGNYIMYARATSGDKLNNNKFSLCSIRNISQVLEKKRNNCFVESGQPICGNGMVEQGEECDCGYSDQCKDECCFDANQPEGRKCKLKPGKQCSPSQGPCCTAQCAFKSKSEKCRDDSDCAREGICNGFTALCPASDPKPNFTDCNRHTQVCINGQCAGSICEKYGLEECTCASSDGKDDKELCHVCCMKKMDPSTCASTGSVQWSRHFSGRTITLQPGSPCNDFRGYCDVFMRCRLVDADGPLARLKKAIFSPELYENIAEWIVAHWWAVLLMGIALIMLMAGFIKICSVHTPSSNPKLPPPKPLPGTLKRRRPPQPIQQPQRQRPRESYQMGHMRR

SEQ ID NO: 69 - DNA, 1752 bp, Homo sapiens
  CDS (1)..(1752)
atggaatccaagggggccagttcctgccgtctgctcttctgcctcttgatctccgccaccgtcttcaggccaggccttggatggtatactgtaaattcagcatatggagataccattatcataccttgccgacttgacgtacctcagaatctcatgtttggcaaatggaaatatgaaaagcccgatggctccccagtatttattgccttcagatcctctacaaagaaaagtgtgcagtacgacgatgtaccagaatacaaagacagattgaacctctcagaaaactacactttgtctatcagtaatgcaaggatcagtgatgaaaagagatttgtgtgcatgctagtaactgaggacaacgtgtttgaggcacctacaatagtcaaggtgttcaagcaaccatctaaacctgaaattgtaagcaaagcactgtttctcgaaacagagcagctaaaaaagttgggtgactgcatttcagaagacagttatccagatggcaatatcacatggtacaggaatggaaaagtgctacatccccttgaaggagcggtggtcataatttttaaaaaggaaatggacccagtgactcagctctataccatgacttccaccctggagtacaagacaaccaaggctgacatacaaatgccattcacctgctcggtgacatattatggaccatctggccagaaaacaattcattctgaacaggcagtatttgatatttactatcctacagagcaggtgacaatacaagtgctgccaccaaaaaatgccatcaaagaaggggataacatcactcttaaatgcttagggaatggcaaccctcccccagaggaatttttgttttacttaccaggacagcccgaaggaataagaagctcaaatacttacacactgacggatgtgaggcgcaatgcaacaggagactacaagtgttccctgatagacaaaaaaagcatgattgcttcaacagctatcacagttcactatttggatttgtccttaaacccaagtggagaagtgactagacagattggtgatgccctacccgtgtcatgcacaatatctgctagcaggaatgcaactgtggtatggatgaaagataacatcaggcttcgatctagcccgtcattttctagtcttcattatcaggatgctggaaactatgtctgcgaaactgctctgcaggaggttgaaggactaaagaaaagagagtcattgactctcattgtagaaggcaaacctcaaataaaaatgacaaagaaaactgatcccagtggactatctaaaacaataatctgccatgtggaaggttttccaaagccagccattcaatggacaattactggcagtggaagcgtcataaaccaaacagaggaatctccttatattaatggcaggtattatagtaaaattatcatttcccctgaagagaatgttacattaacttgcacagcagaaaaccaactggagagaacagtaaactccttgaatgtctctgctataagtattccagaacacgatgaggcagacgagataagtgatgaaaacagagaaaaggtgaatgaccaggcaaaactaattgtgggaatcgttgttggtctcctccttgctgcccttgttgctggtgtcgtctactggctgtacatgaagaagtcaaagactgcatcaaaacatgtaaacaaggacctcggtaatatggaagaaaacaaaaagttagaagaaaacaatcacaaaactgaagcctaa

SEQ ID NO: 70 - protein, 583 aa, Homo sapiens
MESKGASSCRLLFCLLISATVFRPGLGWYTVNSAYGDTIIIPCRLDVPQNLMFGKWKYEKPDGSPVFIAFRSSTKKSVQYDDVPEYKDRLNLSENYTLSISNARISDEKRFVCMLVTEDNVFEAPTIVKVFKQPSKPEIVSKALFLETEQLKKLGDCISEDSYPDGNITWYRNGKVLHPLEGAVVIIFKKEMDPVTQLYTMTSTLEYKTTKADIQMPFTCSVTYYGPSGQKTIHSEQAVFDIYYPTEQVTIQVLPPKNAIKEGDNITLKCLGNGNPPPEEFLFYLPGQPEGIRSSNTYTLTDVRRNATGDYKCSLIDKKSMIASTAITVHYLDLSLNPSGEVTRQIGDALPVSCTISASRNATVVWMKDNIRLRSSPSFSSLHYQDAGNYVCETALQEVEGLKKRESLTLIVEGKPQIKMTKKTDPSGLSKTIICHVEGFPKPAIQWTITGSGSVINQTEESPYINGRYYSKIIISPEENVTLTCTAENQLERTVNSLNVSAISIPEHDEADEISDENREKVNDQAKLIVGIVVGLLLAALVAGVVYWLYMKKSKTASKHVNKDLGNMEENKKLEENNHKTEA

SEQ ID NO: 71 - DNA, 1713 bp, Homo sapiens
  CDS (1)..(1713)
atggaatccaagggggccagttcctgccgtctgctcttctgcctcttgatctccgccaccgtcttcaggccaggccttggatggtatactgtaaattcagcatatggagataccattatcataccttgccgacttgacgtacctcagaatctcatgtttggcaaatggaaatatgaaaagcccgatggctccccagtatttattgccttcagatcctctacaaagaaaagtgtgcagtacgacgatgtaccagaatacaaagacagattgaacctctcagaaaactacactttgtctatcagtaatgcaaggatcagtgatgaaaagagatttgtgtgcatgctagtaactgaggacaacgtgtttgaggcacctacaatagtcaaggtgttcaagcaaccatctaaacctgaaattgtaagcaaagcactgtttctcgaaacagagcagctaaaaaagttgggtgactgcatttcagaagacagttatccagatggcaatatcacatggtacaggaatggaaaagtgctacatccccttgaaggagcggtggtcataatttttaaaaaggaaatggacccagtgactcagctctataccatgacttccaccctggagtacaagacaaccaaggctgacatacaaatgccattcacctgctcggtgacatattatggaccatctggccagaaaacaattcattctgaacaggcagtatttgatatttactatcctacagagcaggtgacaatacaagtgctgccaccaaaaaatgccatcaaagaaggggataacatcactcttaaatgcttagggaatggcaaccctcccccagaggaatttttgttttacttaccaggacagcccgaaggaataagaagctcaaatacttacacactgacggatgtgaggcgcaatgcaacaggagactacaagtgttccctgatagacaaaaaaagcatgattgcttcaacagctatcacagttcactatttggatttgtccttaaacccaagtggagaagtgactagacagattggtgatgccctacccgtgtcatgcacaatatctgctagcaggaatgcaactgtggtatggatgaaagataacatcaggcttcgatctagcccgtcattttctagtcttcattatcaggatgctggaaactatgtctgcgaaactgctctgcaggaggttgaaggactaaagaaaagagagtcattgactctcattgtagaaggcaaacctcaaataaaaatgacaaagaaaactgatcccagtggactatctaaaacaataatctgccatgtggaaggttttccaaagccagccattcaatggacaattactggcagtggaagcgtcataaaccaaacagaggaatctccttatattaatggcaggtattatagtaaaattatcatttcccctgaagagaatgttacattaacttgcacagcagaaaaccaactggagagaacagtaaactccttgaatgtctctgctaatgaaaacagagaaaaggtgaatgaccaggcaaaactaattgtgggaatcgttgttggtctcctccttgctgcccttgttgctggtgtcgtctactggctgtacatgaagaagtcaaagactgcatcaaaacatgtaaacaaggacctcggtaatatggaagaaaacaaaaagttagaagaaaacaatcacaaaactgaagcctaa

SEQ ID NO: 72 - protein, 570 aa, Homo sapiens
MESKGASSCRLLFCLLISATVFRPGLGWYTVNSAYGDTIIIPCRLDVPQNLMFGKWKYEKPDGSPVFIAFRSSTKKSVQYDDVPEYKDRLNLSENYTLSISNARISDEKRFVCMLVTEDNVFEAPTIVKVFKQPSKPEIVSKALFLETEQLKKLGDCISEDSYPDGNITWYRNGKVLHPLEGAVVIIFKKEMDPVTQLYTMTSTLEYKTTKADIQMPFTCSVTYYGPSGQKTIHSEQAVFDIYYPTEQVTIQVLPPKNAIKEGDNITLKCLGNGNPPPEEFLFYLPGQPEGIRSSNTYTLTDVRRNATGDYKCSLIDKKSMIASTAITVHYLDLSLNPSGEVTRQIGDALPVSCTISASRNATVVWMKDNIRLRSSPSFSSLHYQDAGNYVCETALQEVEGLKKRESLTLIVEGKPQIKMTKKTDPSGLSKTIICHVEGFPKPAIQWTITGSGSVINQTEESPYINGRYYSKIIISPEENVTLTCTAENQLERTVNSLNVSANENREKVNDQAKLIVGIVVGLLLAALVAGVVYWLYMKKSKTASKHVNKDLGNMEENKKLEENNHKTEA

SEQ ID NO: 73 - DNA, 2916 bp, Homo sapiens
  CDS (1)..(2916)
atgctgcgccgccccgctcccgcgctggccccggccgcccggctgctgctggccgggctgctgtgcggcggcggggtctgggccgcgcgagttaacaagcacaagccctggctggagcccacctaccacggcatagtcacagagaacgacaacaccgtgctcctcgaccccccactgatcgcgctggataaagatgcgcctctgcgatttgcaggtgagatttgtggatttaaaattcacgggcagaatgtcccctttgatgcagtggtagtggataaatccactggtgagggagtcattcgctccaaagagaaactggactgtgagctgcagaaagactattcattcaccatccaggcctatgattgtgggaagggacctgatggcaccaacgtgaaaaagtctcataaagcaactgttcatattcaggtgaacgacgtgaatgagtacgcgcccgtgttcaaggagaagtcctacaaagccacggtcatcgaggggaagcagtacgacagcattttgagggtggaggccgtggatgccgactgctcccctcagttcagccagatttgcagctacgaaatcatcactccagacgtgccctttactgttgacaaagatggttatataaaaaacacagagaaattaaactacgggaaagaacatcaatataagctgaccgtcactgcctatgactgtgggaagaaaagagccacagaagatgttttggtgaagatcagcattaagcccacctgcacccctgggtggcaaggatggaacaacaggattgagtatgagccgggcaccggcgcgttggccgtctttccaaatatccacctggagacatgtgacgagccagtcgcctcagtacaggccacagtggagctagaaaccagccacatagggaaaggctgcgaccgagacacctactcagagaagtccctccaccggctctgtggtgcggccgcgggcactgccgagctgctgccatccccgagtggatccctcaactggaccatgggcctgcccaccgacaatggccacgacagcgaccaggtgtttgagttcaacggcacccaggcagtgaggatcccggatggcgtcgtgtcggtcagccccaaagagccgttcaccatctcggtgtggatgagacatgggccattcggcaggaagaaggagacaattctttgcagttctgataaaacagatatgaatcggcaccactactccctctatgtccacgggtgccggctgatcttcctcttccgtcaggatccttctgaggagaagaaatacagacctgcagagttccactggaagttgaatcaggtctgtgatgaggaatggcaccactacgtcctcaatgtagaattcccgagtgtgactctctatgtggatggcacgtcccacgagcccttctctgtgactgaggattacccgctccatccatccaagatagaaactcagctcgtggtgggggcttgctggcaagagttttcaggagttgaaaatgacaatgaaactgagcctgtgactgtggcctctgcaggtggcgacctgcacatgacccagtttttccgaggcaatctggctggcttaactctccgttccgggaaactcgcggataagaaggtgatcgactgtctgtatacctgcaaggaggggctggacctgcaggtcctcgaagacagtggcagaggcgtgcagatccaagcacaccccagccagttggtattgaccttggagggagaagacctcggggaattggataaggccatgcagcacatctcgtacctgaactcccggcagttccccacgcccggaattcgcagactcaaaatcaccagcacaatcaagtgttttaacgaggccacctgcatttcggtccccccggtagatggctacgtgatggttttacagcccgaggagcccaagatcagcctgagtggcgtccaccattttgcccgagcagcttctgaatttgaaagctcagaaggggtgttccttttccctgagcttcgcatcatcagcaccatcacgagagaagtggagcctgaaggggacggggctgaggaccccacagttcaagaatcactggtgtccgaggagatcgtgcacgacctggatacctgtgaggtcacggtggagggagaggagctgaaccacgagcaggagagcctggaggtggacatggcccgcctgcagcagaagggcattgaagtgagcagctctgaactgggcatgaccttcacaggcgtggacaccatggccagctacgaggaggttttgcacctgctgcgctatcggaactggcatgccaggtccttgcttgaccggaagtttaagctcatctgctcagagctgaatggccgctacatcagcaacgaatttaaggtggaggtgaatgtaatccacacggccaaccccatggaacacgccaaccacatggctgcccagccacagttcgtgcacccggaacaccgctcctttgttgacctgtcaggccacaacctggccaacccccacccgttcgcagtcgtccccagcactgcgacagttgtgatcgtggtgtgcgtcagcttcctggtgttcatgattatcctgggggtatttcggatccgggccgcacatcggcggaccatgcgggatcaggacaccgggaaggagaacgagatggactgggacgactctgccctgaccatcaccgtcaaccccatggagacctatgaggaccagcacagcagtgaggaggaggaggaagaggaagaggaagaggaaagcgaggacggcgaagaagaggatgacatcaccagcgccgagtcggagagcagcgaggaggaggagggggagcagggcgacccccagaacgcaacccggcagcagcagctggagtgggatgactccaccctcagctactga

SEQ ID NO: 74 - protein, 971 aa, Homo sapiens
MLRRPAPALAPAARLLLAGLLCGGGVWAARVNKHKPWLEPTYHGIVTENDNTVLLDPPLIALDKDAPLRFAGEICGFKIHGQNVPFDAVVVDKSTGEGVIRSKEKLDCELQKDYSFTIQAYDCGKGPDGTNVKKSHKATVHIQVNDVNEYAPVFKEKSYKATVIEGKQYDSILRVEAVDADCSPQFSQICSYEIITPDVPFTVDKDGYIKNTEKLNYGKEHQYKLTVTAYDCGKKRATEDVLVKISIKPTCTPGWQGWNNRIEYEPGTGALAVFPNIHLETCDEPVASVQATVELETSHIGKGCDRDTYSEKSLHRLCGAAAGTAELLPSPSGSLNWTMGLPTDNGHDSDQVFEFNGTQAVRIPDGVVSVSPKEPFTISVWMRHGPFGRKKETILCSSDKTDMNRHHYSLYVHGCRLIFLFRQDPSEEKKYRPAEFHWKLNQVCDEEWHHYVLNVEFPSVTLYVDGTSHEPFSVTEDYPLHPSKIETQLVVGACWQEFSGVENDNETEPVTVASAGGDLHMTQFFRGNLAGLTLRSGKLADKKVIDCLYTCKEGLDLQVLEDSGRGVQIQAHPSQLVLTLEGEDLGELDKAMQHISYLNSRQFPTPGIRRLKITSTIKCFNEATCISVPPVDGYVMVLQPEEPKISLSGVHHFARAASEFESSEGVFLFPELRIISTITREVEPEGDGAEDPTVQESLVSEEIVHDLDTCEVTVEGEELNHEQESLEVDMARLQQKGIEVSSSELGMTFTGVDTMASYEEVLHLLRYRNWHARSLLDRKFKLICSELNGRYISNEFKVEVNVIHTANPMEHANHMAAQPQFVHPEHRSFVDLSGHNLANPHPFAVVPSTATVVIVVCVSFLVFMIILGVFRIRAAHRRTMRDQDTGKENEMDWDDSALTITVNPMETYEDQHSSEEEEEEEEEEESEDGEEEDDITSAESESSEEEEGEQGDPQNATRQQQLEWDDSTLSY

SEQ ID NO: 75 - DNA, 1842 bp, Homo sapiens
  CDS (1)..(1842)
atgggcgccctcaggcccacgctgctgccgccttcgctgccgctgctgctgctgctaatgctaggaatgggatgctgggcccgggaggtgctggtccccgaggggcccttgtaccgcgtggctggcacagctgtctccatctcctgcaatgtgaccggctatgagggccctgcccagcagaacttcgagtggttcctgtataggcccgaggccccagatactgcactgggcattgtcagtaccaaggatacccagttctcctatgctgtcttcaagtcccgagtggtggcgggtgaggtgcaggtgcagcgcctacaaggtgatgccgtggtgctcaagattgcccgcctgcaggcccaggatgccggcatttatgagtgccacaccccctccactgatacccgctacctgggcagctacagcggcaaggtggagctgagagttcttccagatgtcctccaggtgtctgctgcccccccagggccccgaggccgccaggccccaacctcacccccacgcatgacggtgcatgaggggcaggagctggcactgggctgcctggcgaggacaagcacacagaagcacacacacctggcagtgtcctttgggcgatctgtgcccgaggcaccagttgggcggtcaactctgcaggaagtggtgggaatccggtcagacttggccgtggaggctggagctccctatgctgagcgattggctgcaggggagcttcgtctgggcaaggaagggaccgatcggtaccgcatggtagtagggggtgcccaggcaggggacgcaggcacctaccactgcactgccgctgagtggattcaggatcctgatggcagctgggcccagattgcagagaaaagggccgtcctggcccacgtggatgtgcagacgctgtccagccagctggcagtgacagtggggcctggtgaacgtcggatcggcccaggggagcccttggaactgctgtgcaatgtgtcaggggcacttcccccagcaggccgtcatgctgcatactctgtaggttgggagatggcacctgcgggggcacctgggcccggccgcctggtagcccagctggacacagagggtgtgggcagcctgggccctggctatgagggccgacacattgccatggagaaggtggcatccagaacataccggctacggctagaggctgccaggcctggtgatgcgggcacctaccgctgcctcgccaaagcctatgttcgagggtctgggacccggcttcgtgaagcagccagtgcccgttcccggcctctccctgtacatgtgcgggaggaaggtgtggtgctggaggctgtggcatggctagcaggaggcacagtgtaccgcggggagactgcctccctgctgtgcaacatctctgtgcggggtggccccccaggactgcggctggccgccagctggtgggtggagcgaccagaggacggagagctcagctctgtccctgcccagctggtgggtggcgtaggccaggatggtgtggcagagctgggagtccggcctggaggaggccctgtcagcgtagagctggtggggccccgaagccatcggctgagactacacagcttggggcccgaggatgaaggcgtgtaccactgtgcccccagcgcctgggtgcagcatgccgactacagctggtaccaggcgggcagtgcccgctcagggcctgttacagtctacccctacatgcatgccctggacaccctatttgtgcctctgctggtgggtacaggggtggccctagtcactggtgccactgtccttggtaccatcacttgctgcttcatgaagaggcttcgaaaacggtga

SEQ ID NO: 76 - protein, 613 aa, Homo sapiens
MGALRPTLLPPSLPLLLLLMLGMGCWAREVLVPEGPLYRVAGTAVSISCNVTGYEGPAQQNFEWFLYRPEAPDTALGIVSTKDTQFSYAVFKSRVVAGEVQVQRLQGDAVVLKIARLQAQDAGIYECHTPSTDTRYLGSYSGKVELRVLPDVLQVSAAPPGPRGRQAPTSPPRMTVHEGQELALGCLARTSTQKHTHLAVSFGRSVPEAPVGRSTLQEVVGIRSDLAVEAGAPYAERLAAGELRLGKEGTDRYRMVVGGAQAGDAGTYHCTAAEWIQDPDGSWAQIAEKRAVLAHVDVQTLSSQLAVTVGPGERRIGPGEPLELLCNVSGALPPAGRHAAYSVGWEMAPAGAPGPGRLVAQLDTEGVGSLGPGYEGRHIAMEKVASRTYRLRLEAARPGDAGTYRCLAKAYVRGSGTRLREAASARSRPLPVHVREEGVVLEAVAWLAGGTVYRGETASLLCNISVRGGPPGLRLAASWWVERPEDGELSSVPAQLVGGVGQDGVAELGVRPGGGPVSVELVGPRSHRLRLHSLGPEDEGVYHCAPSAWVQHADYSWYQAGSARSGPVTVYPYMHALDTLFVPLLVGTGVALVTGATVLGTITCCFMKRLRKR

SEQ ID NO: 77 - DNA, 1842 bp, Homo sapiens; identical to SEQ ID NO: 75
  CDS (1)..(1842)

SEQ ID NO: 78 - protein, 613 aa, Homo sapiens; identical to SEQ ID NO: 76

SEQ ID NO: 79 - DNA, 1137 bp, Homo sapiens
  CDS (1)..(1137)
atggtcctcctttggctcacgctgctcctgatcgccctgccctgtctcctgcaaacgaaggaagatccaaacccaccaatcacgaacctaaggatgaaagcaaaggctcagcagttgacctgggaccttaacagaaatgtgaccgatatcgagtgtgttaaagacgccgactattctatgccggcagtgaacaatagctattgccagtttggagcaatttccttatgtgaagtgaccaactacaccgtccgagtggccaacccaccattctccacgtggatcctcttccctgagaacagtgggaagccttgggcaggtgcggagaatctgacctgctggattcatgacgtggatttcttgagctgcagctgggcggtaggcccgggggcccccgcggacgtccagtacgacctgtacttgaacgttgccaacaggcgtcaacagtacgagtgtcttcactacaaaacggatgctcagggaacacgtatcgggtgtcgtttcgatgacatctctcgactctccagcggttctcaaagttcccacatcctggtgcggggcaggagcgcagccttcggtatcccctgcacagataagtttgtcgtcttttcacagattgagatattaactccacccaacatgactgcaaagtgtaataagacacattcctttatgcactggaaaatgagaagtcatttcaatcgcaaatttcgctatgagcttcagatacaaaagagaatgcagcctgtaatcacagaacaggtcagagacagaacctccttccagctactcaatcctggaacgtacacagtacaaataagagcccgggaaagagtgtatgaattcttgagcgcctggagcaccccccagcgcttcgagtgcgaccaggaggagggcgcaaacacacgtgcctggcggacgtcgctgctgatcgcgctggggacgctgctggccctggtctgtgtcttcgtgatctgcagaaggtatctggtgatgcagagactctttccccgcatccctcacatgaaagaccccatcggtgacagcttccaaaacgacaagctggtggtctgggaggcgggcaaagccggcctggaggagtgtctggtgactgaagtacaggtcgtgcagaaaacttga

SEQ ID NO: 80 - protein, 378 aa, Homo sapiens
MVLLWLTLLLIALPCLLQTKEDPNPPITNLRMKAKAQQLTWDLNRNVTDIECVKDADYSMPAVNNSYCQFGAISLCEVTNYTVRVANPPFSTWILFPENSGKPWAGAENLTCWIHDVDFLSCSWAVGPGAPADVQYDLYLNVANRRQQYECLHYKTDAQGTRIGCRFDDISRLSSGSQSSHILVRGRSAAFGIPCTDKFVVFSQIEILTPPNMTAKCNKTHSFMHWKMRSHFNRKFRYELQIQKRMQPVITEQVRDRTSFQLLNPGTYTVQIRARERVYEFLSAWSTPQRFECDQEEGANTRAWRTSLLIALGTLLALVCVFVICRRYLVMQRLFPRIPHMKDPIGDSFQNDKLVVWEAGKAGLEECLVTEVQVVQKT

SEQ ID NO: 81 - DNA, 903 bp, Homo sapiens
  CDS (1)..(903)
atggtcctcctttggctcacgctgctcctgatcgccctgccctgtctcctgcaaacgaaggaaggtgggaagccttgggcaggtgcggagaatctgacctgctggattcatgacgtggatttcttgagctgcagctgggcggtaggcccgggggcccccgcggacgtccagtacgacctgtacttgaacgttgccaacaggcgtcaacagtacgagtgtcttcactacaaaacggatgctcagggaacacgtatcgggtgtcgtttcgatgacatctctcgactctccagcggttctcaaagttcccacatcctggtgcggggcaggagcgcagccttcggtatcccctgcacagataagtttgtcgtcttttcacagattgagatattaactccacccaacatgactgcaaagtgtaataagacacattcctttatgcactggaaaatgagaagtcatttcaatcgcaaatttcgctatgagcttcagatacaaaagagaatgcagcctgtaatcacagaacaggtcagagacagaacctccttccagctactcaatcctggaacgtacacagtacaaataagagcccgggaaagagtgtatgaattcttgagcgcctggagcaccccccagcgcttcgagtgcgaccaggaggagggcgcaaacacacgtgcctggcggacgtcgctgctgatcgcgctggggacgctgctggccctggtctgtgtcttcgtgatctgcagaaggtatctggtgatgcagagactctttccccgcatccctcacatgaaagaccccatcggtgacagcttccaaaacgacaagctggtggtctgggaggcgggcaaagccggcctggaggagtgtctggtgactgaagtacaggtcgtgcagaaaacttga

SEQ ID NO: 82 - protein, 300 aa, Homo sapiens
MVLLWLTLLLIALPCLLQTKEGGKPWAGAENLTCWIHDVDFLSCSWAVGPGAPADVQYDLYLNVANRRQQYECLHYKTDAQGTRIGCRFDDISRLSSGSQSSHILVRGRSAAFGIPCTDKFVVFSQIEILTPPNMTAKCNKTHSFMHWKMRSHFNRKFRYELQIQKRMQPVITEQVRDRTSFQLLNPGTYTVQIRARERVYEFLSAWSTPQRFECDQEEGANTRAWRTSLLIALGTLLALVCVFVICRRYLVMQRLFPRIPHMKDPIGDSFQNDKLVVWEAGKAGLEECLVTEVQVVQKT

SEQ ID NO: 83 - DNA, 3201 bp, Homo sapiens
  CDS (1)..(3201)
atgggccccggccccagccgcgcgccccgcgccccacgcctgatgctctgtgcgctcgccttgatggtggcggccggcggctgcgtcgtctccgccttcaacctggatacccgattcctggtagtgaaggaggccgggaacccgggcagcctcttcggctactcggtcgccctccatcggcagacagagcggcagcagcgctacctgctcctggctggtgccccccgggagctcgctgtgcccgatggctacaccaaccggactggtgctgtgtacctgtgcccactcactgcccacaaggatgactgtgagcggatgaacatcacagtgaaaaatgaccctggccatcacattattgaggacatgtggcttggagtgactgtggccagccagggccctgcaggcagagttctggtctgtgcccaccgctacacccaggtgctgtggtcagggtcagaagaccagcggcgcatggtgggcaagtgctacgtgcgaggcaatgacctagagctggactccagtgatgactggcagacctaccacaacgagatgtgcaatagcaacacagactacctggagacgggcatgtgccagctgggcaccagcggtggcttcacccagaacactgtgtacttcggcgcccccggtgcctacaactggaaaggaaacagctacatgattcagcgcaaggagtgggacttatctgagtatagttacaaggacccagaggaccaaggaaacctctatattgggtacacgatgcaggtaggcagcttcatcctgcaccccaaaaacatcaccattgtgacaggtgccccacggcaccgacatatgggcgcggtgttcttgctgagccaggaggcaggcggagacctgcggaggaggcaggtgctggagggctcgcaggtgggcgcctattttggcagcgccattgccctggcagacctgaacaatgatgggtggcaggacctcctggtgggcgccccctactacttcgagaggaaagaggaagtagggggtgccatctatgtcttcatgaaccaggcgggaacctccttccctgctcacccctcactccttcttcatggccccagtggctctgcctttggtttatctgtggccagcattggtgacatcaaccaggatggatttcaggatattgctgtgggagctccgtttgaaggcttgggcaaagtgtacatctatcacagtagctctaaggggctccttagacagccccagcaggtaatccatggagagaagctgggactgcctgggttggccaccttcggctattccctcagtgggcagatggatgtggatgagaacttctacccagaccttctagtgggaagcctgtcagaccacattgtgctgctgcgggcccggcccgtcatcaacatcgtccacaagaccttggtgcccaggccagctgtgctggaccctgcactttgcacggccacctcttgtgtgcaagtggagctgtgctttgcttacaaccagagtgccgggaaccccaactacaggcgaaacatcaccctggcctacactctggaggctgacagggaccgccggccgccccggctccgctttgccggcagtgagtccgctgtcttccacggcttcttctccatgcccgagatgcgctgccagaagctggagctgctcctgatggacaacctccgtgacaaactccgccccatcatcatctccatgaactactctttacctttgcggatgcccgatcgcccccggctggggctgcggtccctggacgcctacccgatcctcaaccaggcacaggctctggagaaccacactgaggtccagttccagaaggagtgcgggcctgacaacaagtgtgagagcaacttgcagatgcgggcagccttcgtgtcagagcagcagcagaagctgagcaggctccagtacagcagagacgtccggaaattgctcctgagcatcaacgtgacgaacacccggacctcggagcgctccggggaggacgcccacgaggcgctgctcaccctggtggtgcctcccgccctgctgctgtcctcagtgcgcccccccggggcctgccaagctaatgagaccatcttttgcgagctggggaaccccttcaaacggaaccagaggatggagctgctcatcgcctttgaggtcatcggggtgaccctgcacacaagggaccttcaggtgcagctgcagctctccacgtcgagtcaccaggacaacctgtggcccatgatcctcactctgctggtggactatacactccagacctcgcttagcatggtaaatcaccggctacaaagcttctttggggggacagtgatgggtgagtctggcatgaaaactgtggaggatgtaggaagccccctcaagtatgaattccaggtgggcccaatgggggaggggctggtgggcctggggaccctggtcctaggtctggagtggccctacgaagtcagcaatggcaagtggctgctgtatcccacggagatcaccgtccatggcaatgggtcctggccctgccgaccacctggagaccttatcaaccctctcaacctcactctttctgaccctggggacaggccatcatccccacagcgcaggcggcgacagctggatccagggggaggccagggccccccacctgtcactctggctgctgccaaaaaagccaagtctgagactgtgctgacctgtgccacagggcgtgcccactgtgtgtggctagagtgccccatccctgatgcccccgttgtcaccaacgtgactgtgaaggcacgagtgtggaacagcaccttcatcgaggattacagagactttgaccgagtccgggtaaatggctgggctaccctattcctccgaaccagcatccccaccatcaacatggagaacaagaccacgtggttctctgtggacattgactcggagctggtggaggagctgccggccgaaatcgagctgtggctggtgctggtggccgtgggtgcagggctgctgctgctggggctgatcatcctcctgctgtggaagtgtgacttctttaagcggacccgctattatcagatcatgcccaagtaccacgcagtgcggatccgggaggaggagcgctacccacctccagggagcaccctgcccaccaagaagcactgggtgaccagctggcagactcgggaccaatactactga

SEQ ID NO: 84 - protein, 1066 aa, Homo sapiens
MGPGPSRAPRAPRLMLCALALMVAAGGCVVSAFNLDTRFLVVKEAGNPGSLFGYSVALHRQTERQQRYLLLAGAPRELAVPDGYTNRTGAVYLCPLTAHKDDCERMNITVKNDPGHHIIEDMWLGVTVASQGPAGRVLVCAHRYTQVLWSGSEDQRRMVGKCYVRGNDLELDSSDDWQTYHNEMCNSNTDYLETGMCQLGTSGGFTQNTVYFGAPGAYNWKGNSYMIQRKEWDLSEYSYKDPEDQGNLYIGYTMQVGSFILHPKNITIVTGAPRHRHMGAVFLLSQEAGGDLRRRQVLEGSQVGAYFGSAIALADLNNDGWQDLLVGAPYYFERKEEVGGAIYVFMNQAGTSFPAHPSLLLHGPSGSAFGLSVASIGDINQDGFQDIAVGAPFEGLGKVYIYHSSSKGLLRQPQQVIHGEKLGLPGLATFGYSLSGQMDVDENFYPDLLVGSLSDHIVLLRARPVINIVHKTLVPRPAVLDPALCTATSCVQVELCFAYNQSAGNPNYRRNITLAYTLEADRDRRPPRLRFAGSESAVFHGFFSMPEMRCQKLELLLMDNLRDKLRPIIISMNYSLPLRMPDRPRLGLRSLDAYPILNQAQALENHTEVQFQKECGPDNKCESNLQMRAAFVSEQQQKLSRLQYSRDVRKLLLSINVTNTRTSERSGEDAHEALLTLVVPPALLLSSVRPPGACQANETIFCELGNPFKRNQRMELLIAFEVIGVTLHTRDLQVQLQLSTSSHQDNLWPMILTLLVDYTLQTSLSMVNHRLQSFFGGTVMGESGMKTVEDVGSPLKYEFQVGPMGEGLVGLGTLVLGLEWPYEVSNGKWLLYPTEITVHGNGSWPCRPPGDLINPLNLTLSDPGDRPSSPQRRRRQLDPGGGQGPPPVTLAAAKKAKSETVLTCATGRAHCVWLECPIPDAPVVTNVTVKARVWNSTFIEDYRDFDRVRVNGWATLFLRTSIPTINMENKTTWFSVDIDSELVEELPAEIELWLVLVAVGAGLLLLGLIILLLWKCDFFKRTRYYQIMPKYHAVRIREEERYPPPGSTLPTKKHWVTSWQTRDQYY

SEQ ID NO: 85 - DNA, 3156 bp, Homo sapiens
  CDS (1)..(3156)
atgggccccggccccagccgcgcgccccgcgccccacgcctgatgctctgtgcgctcgccttgatggtggcggccggcggctgcgtcgtctccgccttcaacctggatacccgattcctggtagtgaaggaggccgggaacccgggcagcctcttcggctactcggtcgccctccatcggcagacagagcggcagcagcgctacctgctcctggctggtgccccccgggagctcgctgtgcccgatggctacaccaaccggactggtgctgtgtacctgtgcccactcactgcccacaaggatgactgtgagcggatgaacatcacagtgaaaaatgaccctggccatcacattattgaggacatgtggcttggagtgactgtggccagccagggccctgcaggcagagttctggtctgtgcccaccgctacacccaggtgctgtggtcagggtcagaagaccagcggcgcatggtgggcaagtgctacgtgcgaggcaatgacctagagctggactccagtgatgactggcagacctaccacaacgagatgtgcaatagcaacacagactacctggagacgggcatgtgccagctgggcaccagcggtggcttcacccagaacactgtgtacttcggcgcccccggtgcctacaactggaaaggaaacagctacatgattcagcgcaaggagtgggacttatctgagtatagttacaaggacccagaggaccaaggaaacctctatattgggtacacgatgcaggtaggcagcttcatcctgcaccccaaaaacatcaccattgtgacaggtgccccacggcaccgacatatgggcgcggtgttcttgctgagccaggaggcaggcggagacctgcggaggaggcaggtgctggagggctcgcaggtgggcgcctattttggcagcgccattgccctggcagacctgaacaatgatgggtggcaggacctcctggtgggcgccccctactacttcgagaggaaagaggaagtagggggtgccatctatgtcttcatgaaccaggcgggaacctccttccctgctcacccctcactccttcttcatggccccagtggctctgcctttggtttatctgtggccagcattggtgacatcaaccaggatggatttcaggatattgctgtgggagctccgtttgaaggcttgggcaaagtgtacatctatcacagtagctctaaggggctccttagacagccccagcaggtaatccatggagagaagctgggactgcctgggttggccaccttcggctattccctcagtgggcagatggatgtggatgagaacttctacccagaccttctagtgggaagcctgtcagaccacattgtgctgctgcgggcccggcccgtcatcaacatcgtccacaagaccttggtgcccaggccagctgtgctggaccctgcactttgcacggccacctcttgtgtgcaagtggagctgtgctttgcttacaaccagagtgccgggaaccccaactacaggcgaaacatcaccctggcctacactctggaggctgacagggaccgccggccgccccggctccgctttgccggcagtgagtccgctgtcttccacggcttcttctccatgcccgagatgcgctgccagaagctggagctgctcctgatggacaacctccgtgacaaactccgccccatcatcatctccatgaactactctttacctttgcggatgcccgatcgcccccggctggggctgcggtccctggacgcctacccgatcctcaaccaggcacaggctctggagaaccacactgaggtccagttccagaaggagtgcgggcctgacaacaagtgtgagagcaacttgcagatgcgggcagccttcgtgtcagagcagcagcagaagctgagcaggctccagtacagcagagacgtccggaaattgctcctgagcatcaacgtgacgaacacccggacctcggagcgctccggggaggacgcccacgaggcgctgctcaccctggtggtgcctcccgccctgctgctgtcctcagtgcgcccccccggggcctgccaagctaatgagaccatcttttgcgagctggggaaccccttcaaacggaaccagaggatggagctgctcatcgcctttgaggtcatcggggtgaccctgcacacaagggaccttcaggtgcagctgcagctctccacgtcgagtcaccaggacaacctgtggcccatgatcctcactctgctggtggactatacactccagacctcgcttagcatggtaaatcaccggctacaaagcttctttggggggacagtgatgggtgagtctggcatgaaaactgtggaggatgtaggaagccccctcaagtatgaattccaggtgggcccaatgggggaggggctggtgggcctggggaccctggtcctaggtctggagtggccctacgaagtcagcaatggcaagtggctgctgtatcccacggagatcaccgtccatggcaatgggtcctggccctgccgaccacctggagaccttatcaaccctctcaacctcactctttctgaccctggggacaggccatcatccccacagcgcaggcggcgacagctggatccagggggaggccagggccccccacctgtcactctggctgctgccaaaaaagccaagtctgagactgtgctgacctgtgccacagggcgtgcccactgtgtgtggctagagtgccccatccctgatgcccccgttgtcaccaacgtgactgtgaaggcacgagtgtggaacagcaccttcatcgaggattacagagactttgaccgagtccgggtaaatggctgggctaccctattcctccgaaccagcatccccaccatcaacatggagaacaagaccacgtggttctctgtggacattgactcggagctggtggaggagctgccggccgaaatcgagctgtggctggtgctggtggccgtgggtgcagggctgctgctgctggggctgatcatcctcctgctgtggaagtgcggcttcttcaagcgagcccgcactcgcgccctgtatgaagctaagaggcagaaggcggagatgaagagccagccgtcagagacagagaggctgaccgacgactactga

SEQ ID NO: 86 - protein, 1051 aa, Homo sapiens
MGPGPSRAPRAPRLMLCALALMVAAGGCVVSAFNLDTRFLVVKEAGNPGSLFGYSVALHRQTERQQRYLLLAGAPRELAVPDGYTNRTGAVYLCPLTAHKDDCERMNITVKNDPGHHIIEDMWLGVTVASQGPAGRVLVCAHRYTQVLWSGSEDQRRMVGKCYVRGNDLELDSSDDWQTYHNEMCNSNTDYLETGMCQLGTSGGFTQNTVYFGAPGAYNWKGNSYMIQRKEWDLSEYSYKDPEDQGNLYIGYTMQVGSFILHPKNITIVTGAPRHRHMGAVFLLSQEAGGDLRRRQVLEGSQVGAYFGSAIALADLNNDGWQDLLVGAPYYFERKEEVGGAIYVFMNQAGTSFPAHPSLLLHGPSGSAFGLSVASIGDINQDGFQDIAVGAPFEGLGKVYIYHSSSKGLLRQPQQVIHGEKLGLPGLATFGYSLSGQMDVDENFYPDLLVGSLSDHIVLLRARPVINIVHKTLVPRPAVLDPALCTATSCVQVELCFAYNQSAGNPNYRRNITLAYTLEADRDRRPPRLRFAGSESAVFHGFFSMPEMRCQKLELLLMDNLRDKLRPIIISMNYSLPLRMPDRPRLGLRSLDAYPILNQAQALENHTEVQFQKECGPDNKCESNLQMRAAFVSEQQQKLSRLQYSRDVRKLLLSINVTNTRTSERSGEDAHEALLTLVVPPALLLSSVRPPGACQANETIFCELGNPFKRNQRMELLIAFEVIGVTLHTRDLQVQLQLSTSSHQDNLWPMILTLLVDYTLQTSLSMVNHRLQSFFGGTVMGESGMKTVEDVGSPLKYEFQVGPMGEGLVGLGTLVLGLEWPYEVSNGKWLLYPTEITVHGNGSWPCRPPGDLINPLNLTLSDPGDRPSSPQRRRRQLDPGGGQGPPPVTLAAAKKAKSETVLTCATGRAHCVWLECPIPDAPVVTNVTVKARVWNSTFIEDYRDFDRVRVNGWATLFLRTSIPTINMENKTTWFSVDIDSELVEELPAEIELWLVLVAVGAGLLLLGLIILLLWKCGFFKRARTRALYEAKRQKAEMKSQPSETERLTDDY

SEQ ID NO: 87 - DNA, 2397 bp, Homo sapiens
  CDS (1)..(2397)
atgaatttacaaccaattttctggattggactgatcagttcagtttgctgtgtgtttgctcaaacagatgaaaatagatgtttaaaagcaaatgccaaatcatgtggagaatgtatacaagcagggccaaattgtgggtggtgcacaaattcaacatttttacaggaaggaatgcctacttctgcacgatgtgatgatttagaagccttaaaaaagaagggttgccctccagatgacatagaaaatcccagaggctccaaagatataaagaaaaataaaaatgtaaccaaccgtagcaaaggaacagcagagaagctcaagccagaggatattactcagatccaaccacagcagttggttttgcgattaagatcaggggagccacagacatttacattaaaattcaagagagctgaagactatcccattgacctctactaccttatggacctgtcttactcaatgaaagacgatttggagaatgtaaaaagtcttggaacagatctgatgaatgaaatgaggaggattacttcggacttcagaattggatttggctcatttgtggaaaagactgtgatgccttacattagcacaacaccagctaagctcaggaacccttgcacaagtgaacagaactgcaccagcccatttagctacaaaaatgtgctcagtcttactaataaaggagaagtatttaatgaacttgttggaaaacagcgcatatctggaaatttggattctccagaaggtggtttcgatgccatcatgcaagttgcagtttgtggatcactgattggctggaggaatgttacacggctgctggtgttttccacagatgccgggtttcactttgctggagatgggaaacttggtggcattgttttaccaaatgatggacaatgtcacctggaaaataatatgtacacaatgagccattattatgattatccttctattgctcaccttgtccagaaactgagtgaaaataatattcagacaatttttgcagttactgaagaatttcagcctgtttacaaggagctgaaaaacttgatccctaagtcagcagtaggaacattatctgcaaattctagcaatgtaattcagttgatcattgatgcatacaattccctttcctcagaagtcattttggaaaacggcaaattgtcagaaggcgtaacaataagttacaaatcttactgcaagaacggggtgaatggaacaggggaaaatggaagaaaatgttccaatatttccattggagatgaggttcaatttgaaattagcataacttcaaataagtgtccaaaaaaggattctgacagctttaaaattaggcctctgggctttacggaggaagtagaggttattcttcagtacatctgtgaatgtgaatgccaaagcgaaggcatccctgaaagtcccaagtgtcatgaaggaaatgggacatttgagtgtggcgcgtgcaggtgcaatgaagggcgtgttggtagacattgtgaatgcagcacagatgaagttaacagtgaagacatggatgcttactgcaggaaagaaaacagttcagaaatctgcagtaacaatggagagtgcgtctgcggacagtgtgtttgtaggaagagggataatacaaatgaaatttattctggcaaattctgcgagtgtgataatttcaactgtgatagatccaatggcttaatttgtggaggaaatggtgtttgcaagtgtcgtgtgtgtgagtgcaaccccaactacactggcagtgcatgtgactgttctttggatactagtacttgtgaagccagcaacggacagatctgcaatggccggggcatctgcgagtgtggtgtctgtaagtgtacagatccgaagtttcaagggcaaacgtgtgagatgtgtcagacctgccttggtgtctgtgctgagcataaagaatgtgttcagtgcagagccttcaataaaggagaaaagaaagacacatgcacacaggaatgttcctattttaacattaccaaggtagaaagtcgggacaaattaccccagccggtccaacctgatcctgtgtcccattgtaaggagaaggatgttgacgactgttggttctattttacgtattcagtgaatgggaacaacgaggtcatggttcatgttgtggagaatccagagtgtcccactggtccagacatcattccaattgtagctggtgtggttgctggaattgttcttattggccttgcattactgctgatatggaagcttttaatgataattcatgacagaagggagtttgctaaatttgaaaaggagaaaatgaatgccaaatgggacacgggtgaaaatcctatttataagagtgccgtaacaactgtggtcaatccgaagtatgagggaaaatga

SEQ ID NO: 88 - protein, 798 aa, Homo sapiens
MNLQPIFWIGLISSVCCVFAQTDENRCLKANAKSCGECIQAGPNCGWCTNSTFLQEGMPTSARCDDLEALKKKGCPPDDIENPRGSKDIKKNKNVTNRSKGTAEKLKPEDITQIQPQQLVLRLRSGEPQTFTLKFKRAEDYPIDLYYLMDLSYSMKDDLENVKSLGTDLMNEMRRITSDFRIGFGSFVEKTVMPYISTTPAKLRNPCTSEQNCTSPFSYKNVLSLTNKGEVFNELVGKQRISGNLDSPEGGFDAIMQVAVCGSLIGWRNVTRLLVFSTDAGFHFAGDGKLGGIVLPNDGQCHLENNMYTMSHYYDYPSIAHLVQKLSENNIQTIFAVTEEFQPVYKELKNLIPKSAVGTLSANSSNVIQLIIDAYNSLSSEVILENGKLSEGVTISYKSYCKNGVNGTGENGRKCSNISIGDEVQFEISITSNKCPKKDSDSFKIRPLGFTEEVEVILQYICECECQSEGIPESPKCHEGNGTFECGACRCNEGRVGRHCECSTDEVNSEDMDAYCRKENSSEICSNNGECVCGQCVCRKRDNTNEIYSGKFCECDNFNCDRSNGLICGGNGVCKCRVCECNPNYTGSACDCSLDTSTCEASNGQICNGRGICECGVCKCTDPKFQGQTCEMCQTCLGVCAEHKECVQCRAFNKGEKKDTCTQECSYFNITKVESRDKLPQPVQPDPVSHCKEKDVDDCWFYFTYSVNGNNEVMVHVVENPECPTGPDIIPIVAGVVAGIVLIGLALLLIWKLLMIIHDRREFAKFEKEKMNAKWDTGENPIYKSAVTTVVNPKYEGK

SEQ ID NO: 89 - DNA, 2406 bp, Homo sapiens
  CDS (1)..(2406)
atgaatttacaaccaattttctggattggactgatcagttcagtttgctgtgtgtttgctcaaacagatgaaaatagatgtttaaaagcaaatgccaaatcatgtggagaatgtatacaagcagggccaaattgtgggtggtgcacaaattcaacatttttacaggaaggaatgcctacttctgcacgatgtgatgatttagaagccttaaaaaagaagggttgccctccagatgacatagaaaatcccagaggctccaaagatataaagaaaaataaaaatgtaaccaaccgtagcaaaggaacagcagagaagctcaagccagaggatattactcagatccaaccacagcagttggttttgcgattaagatcaggggagccacagacatttacattaaaattcaagagagctgaagactatcccattgacctctactaccttatggacctgtcttactcaatgaaagacgatttggagaatgtaaaaagtcttggaacagatctgatgaatgaaatgaggaggattacttcggacttcagaattggatttggctcatttgtggaaaagactgtgatgccttacattagcacaacaccagctaagctcaggaacccttgcacaagtgaacagaactgcaccagcccatttagctacaaaaatgtgctcagtcttactaataaaggagaagtatttaatgaacttgttggaaaacagcgcatatctggaaatttggattctccagaaggtggtttcgatgccatcatgcaagttgcagtttgtggatcactgattggctggaggaatgttacacggctgctggtgttttccacagatgccgggtttcactttgctggagatgggaaacttggtggcattgttttaccaaatgatggacaatgtcacctggaaaataatatgtacacaatgagccattattatgattatccttctattgctcaccttgtccagaaactgagtgaaaataatattcagacaatttttgcagttactgaagaatttcagcctgtttacaaggagctgaaaaacttgatccctaagtcagcagtaggaacattatctgcaaattctagcaatgtaattcagttgatcattgatgcatacaattccctttcctcagaagtcattttggaaaacggcaaattgtcagaaggcgtaacaataagttacaaatcttactgcaagaacggggtgaatggaacaggggaaaatggaagaaaatgttccaatatttccattggagatgaggttcaatttgaaattagcataacttcaaataagtgtccaaaaaaggattctgacagctttaaaattaggcctctgggctttacggaggaagtagaggttattcttcagtacatctgtgaatgtgaatgccaaagcgaaggcatccctgaaagtcccaagtgtcatgaaggaaatgggacatttgagtgtggcgcgtgcaggtgcaatgaagggcgtgttggtagacattgtgaatgcagcacagatgaagttaacagtgaagacatggatgcttactgcaggaaagaaaacagttcagaaatctgcagtaacaatggagagtgcgtctgcggacagtgtgtttgtaggaagagggataatacaaatgaaatttattctggcaaattctgcgagtgtgataatttcaactgtgatagatccaatggcttaatttgtggaggaaatggtgtttgcaagtgtcgtgtgtgtgagtgcaaccccaactacactggcagtgcatgtgactgttctttggatactagtacttgtgaagccagcaacggacagatctgcaatggccggggcatctgcgagtgtggtgtctgtaagtgtacagatccgaagtttcaagggcaaacgtgtgagatgtgtcagacctgccttggtgtctgtgctgagcataaagaatgtgttcagtgcagagccttcaataaaggagaaaagaaagacacatgcacacaggaatgttcctattttaacattaccaaggtagaaagtcgggacaaattaccccagccggtccaacctgatcctgtgtcccattgtaaggagaaggatgttgacgactgttggttctattttacgtattcagtgaatgggaacaacgaggtcatggttcatgttgtggagaatccagagtgtcccactggtccagacatcattccaattgtagctggtgtggttgctggaattgttcttattggccttgcattactgctgatatggaagcttttaatgataattcatgacagaagggagtttgctaaatttgaaaaggagaaaatgaatgccaaatgggacacgcaagaaaatccgatttacaagagtcctattaataatttcaagaatccaaactacggacgtaaagctggtctctaa

SEQ ID NO: 90 - protein, 801 aa, Homo sapiens
MNLQPIFWIGLISSVCCVFAQTDENRCLKANAKSCGECIQAGPNCGWCTNSTFLQEGMPTSARCDDLEALKKKGCPPDDIENPRGSKDIKKNKNVTNRSKGTAEKLKPEDITQIQPQQLVLRLRSGEPQTFTLKFKRAEDYPIDLYYLMDLSYSMKDDLENVKSLGTDLMNEMRRITSDFRIGFGSFVEKTVMPYISTTPAKLRNPCTSEQNCTSPFSYKNVLSLTNKGEVFNELVGKQRISGNLDSPEGGFDAIMQVAVCGSLIGWRNVTRLLVFSTDAGFHFAGDGKLGGIVLPNDGQCHLENNMYTMSHYYDYPSIAHLVQKLSENNIQTIFAVTEEFQPVYKELKNLIPKSAVGTLSANSSNVIQLIIDAYNSLSSEVILENGKLSEGVTISYKSYCKNGVNGTGENGRKCSNISIGDEVQFEISITSNKCPKKDSDSFKIRPLGFTEEVEVILQYICECECQSEGIPESPKCHEGNGTFECGACRCNEGRVGRHCECSTDEVNSEDMDAYCRKENSSEICSNNGECVCGQCVCRKRDNTNEIYSGKFCECDNFNCDRSNGLICGGNGVCKCRVCECNPNYTGSACDCSLDTSTCEASNGQICNGRGICECGVCKCTDPKFQGQTCEMCQTCLGVCAEHKECVQCRAFNKGEKKDTCTQECSYFNITKVESRDKLPQPVQPDPVSHCKEKDVDDCWFYFTYSVNGNNEVMVHVVENPECPTGPDIIPIVAGVVAGIVLIGLALLLIWKLLMIIHDRREFAKFEKEKMNAKWDTQENPIYKSPINNFKNPNYGRKAGL

SEQ ID NO: 91 - DNA, 1233 bp, Homo sapiens
  CDS (1)..(1233)
atggtgtgcttccgcctcttcccggttccgggctcagggctcgttctggtctgcctagtcctgggagctgtgcggtcttatgcattggaacttaatttgacagattcagaaaatgccacttgcctttatgcaaaatggcagatgaatttcacagtacgctatgaaactacaaataaaacttataaaactgtaaccatttcagaccatggcactgtgacatataatggaagcatttgtggggatgatcagaatggtcccaaaatagcagtgcagttcggacctggcttttcctggattgcgaattttaccaaggcagcatctacttattcaattgacagcgtctcattttcctacaacactggtgataacacaacatttcctgatgctgaagataaaggaattcttactgttgatgaacttttggccatcagaattccattgaatgacctttttagatgcaatagtttatcaactttggaaaagaatgatgttgtccaacactactgggatgttcttgtacaagcttttgtccaaaatggcacagtgagcacaaatgagttcctgtgtgataaagacaaaacttcaacagtggcacccaccatacacaccactgtgccatctcctactacaacacctactccaaaggaaaaaccagaagctggaacctattcagttaataatggcaatgatacttgtctgctggctaccatggggctgcagctgaacatcactcaggataaggttgcttcagttattaacatcaaccccaatacaactcactccacaggcagctgccgttctcacactgctctacttagactcaatagcagcaccattaagtatctagactttgtctttgctgtgaaaaatgaaaaccgattttatctgaaggaagtgaacatcagcatgtatttggttaatggctccgttttcagcattgcaaataacaatctcagctactgggatgcccccctgggaagttcttatatgtgcaacaaagagcagactgtttcagtgtctggagcatttcagataaatacctttgatctaagggttcagcctttcaatgtgacacaaggaaagtattctacagctcaagactgcagtgcagatgacgacaacttccttgtgcccatagcggtgggagctgccttggcaggagtacttattctagtgttgctggcttattttattggtctcaagcaccatcatgctggatatgagcaattttag

SEQ ID NO: 92 - protein, 410 aa, Homo sapiens
MVCFRLFPVPGSGLVLVCLVLGAVRSYALELNLTDSENATCLYAKWQMNFTVRYETTNKTYKTVTISDHGTVTYNGSICGDDQNGPKIAVQFGPGFSWIANFTKAASTYSIDSVSFSYNTGDNTTFPDAEDKGILTVDELLAIRIPLNDLFRCNSLSTLEKNDVVQHYWDVLVQAFVQNGTVSTNEFLCDKDKTSTVAPTIHTTVPSPTTTPTPKEKPEAGTYSVNNGNDTCLLATMGLQLNITQDKVASVININPNTTHSTGSCRSHTALLRLNSSTIKYLDFVFAVKNENRFYLKEVNISMYLVNGSVFSIANNNLSYWDAPLGSSYMCNKEQTVSVSGAFQINTFDLRVQPFNVTQGKYSTAQDCSADDDNFLVPIAVGAALAGVLILVLLAYFIGLKHHHAGYEQF

SEQ ID NO: 93 - DNA, 1233 bp, Homo sapiens
  CDS (1)..(1233)
atggtgtgcttccgcctcttcccggttccgggctcagggctcgttctggtctgcctagtcctgggagctgtgcggtcttatgcattggaacttaatttgacagattcagaaaatgccacttgcctttatgcaaaatggcagatgaatttcacagtacgctatgaaactacaaataaaacttataaaactgtaaccatttcagaccatggcactgtgacatataatggaagcatttgtggggatgatcagaatggtcccaaaatagcagtgcagttcggacctggcttttcctggattgcgaattttaccaaggcagcatctacttattcaattgacagcgtctcattttcctacaacactggtgataacacaacatttcctgatgctgaagataaaggaattcttactgttgatgaacttttggccatcagaattccattgaatgacctttttagatgcaatagtttatcaactttggaaaagaatgatgttgtccaacactactgggatgttcttgtacaagcttttgtccaaaatggcacagtgagcacaaatgagttcctgtgtgataaagacaaaacttcaacagtggcacccaccatacacaccactgtgccatctcctactacaacacctactccaaaggaaaaaccagaagctggaacctattcagttaataatggcaatgatacttgtctgctggctaccatggggctgcagctgaacatcactcaggataaggttgcttcagttattaacatcaaccccaatacaactcactccacaggcagctgccgttctcacactgctctacttagactcaatagcagcaccattaagtatctagactttgtctttgctgtgaaaaatgaaaaccgattttatctgaaggaagtgaacatcagcatgtatttggttaatggctccgttttcagcattgcaaataacaatctcagctactgggatgcccccctgggaagttcttatatgtgcaacaaagagcagactgtttcagtgtctggagcatttcagataaatacctttgatctaagggttcagcctttcaatgtgacacaaggaaagtattctacagcccaagagtgttcgctggatgatgacaccattctaatcccaattatagttggtgctggtctttcaggcttgattatcgttatagtgattgcttacgtaattggcagaagaaaaagttatgctggatatcagactctgtaa

SEQ ID NO: 94 - protein, 410 aa, Homo sapiens
MVCFRLFPVPGSGLVLVCLVLGAVRSYALELNLTDSENATCLYAKWQMNFTVRYETTNKTYKTVTISDHGTVTYNGSICGDDQNGPKIAVQFGPGFSWIANFTKAASTYSIDSVSFSYNTGDNTTFPDAEDKGILTVDELLAIRIPLNDLFRCNSLSTLEKNDVVQHYWDVLVQAFVQNGTVSTNEFLCDKDKTSTVAPTIHTTVPSPTTTPTPKEKPEAGTYSVNNGNDTCLLATMGLQLNITQDKVASVININPNTTHSTGSCRSHTALLRLNSSTIKYLDFVFAVKNENRFYLKEVNISMYLVNGSVFSIANNNLSYWDAPLGSSYMCNKEQTVSVSGAFQINTFDLRVQPFNVTQGKYSTAQECSLDDDTILIPIIVGAGLSGLIIVIVIAYVIGRRKSYAGYQTL

SEQ ID NO: 95 - DNA, 1236 bp, Homo sapiens
  CDS (1)..(1236)
atggtgtgcttccgcctcttcccggttccgggctcagggctcgttctggtctgcctagtcctgggagctgtgcggtcttatgcattggaacttaatttgacagattcagaaaatgccacttgcctttatgcaaaatggcagatgaatttcacagtacgctatgaaactacaaataaaacttataaaactgtaaccatttcagaccatggcactgtgacatataatggaagcatttgtggggatgatcagaatggtcccaaaatagcagtgcagttcggacctggcttttcctggattgcgaattttaccaaggcagcatctacttattcaattgacagcgtctcattttcctacaacactggtgataacacaacatttcctgatgctgaagataaaggaattcttactgttgatgaacttttggccatcagaattccattgaatgacctttttagatgcaatagtttatcaactttggaaaagaatgatgttgtccaacactactgggatgttcttgtacaagcttttgtccaaaatggcacagtgagcacaaatgagttcctgtgtgataaagacaaaacttcaacagtggcacccaccatacacaccactgtgccatctcctactacaacacctactccaaaggaaaaaccagaagctggaacctattcagttaataatggcaatgatacttgtctgctggctaccatggggctgcagctgaacatcactcaggataaggttgcttcagttattaacatcaaccccaatacaactcactccacaggcagctgccgttctcacactgctctacttagactcaatagcagcaccattaagtatctagactttgtctttgctgtgaaaaatgaaaaccgattttatctgaaggaagtgaacatcagcatgtatttggttaatggctccgttttcagcattgcaaataacaatctcagctactgggatgcccccctgggaagttcttatatgtgcaacaaagagcagactgtttcagtgtctggagcatttcagataaatacctttgatctaagggttcagcctttcaatgtgacacaaggaaagtattctacagctgaagaatgttctgctgactctgacctcaactttcttattcctgttgcagtgggtgtggccttgggcttccttataattgttgtctttatctcttatatgattggaagaaggaaaagtcgtactggttatcagtctgtgtaa

SEQ ID NO: 96 - protein, 411 aa, Homo sapiens
MVCFRLFPVPGSGLVLVCLVLGAVRSYALELNLTDSENATCLYAKWQMNFTVRYETTNKTYKTVTISDHGTVTYNGSICGDDQNGPKIAVQFGPGFSWIANFTKAASTYSIDSVSFSYNTGDNTTFPDAEDKGILTVDELLAIRIPLNDLFRCNSLSTLEKNDVVQHYWDVLVQAFVQNGTVSTNEFLCDKDKTSTVAPTIHTTVPSPTTTPTPKEKPEAGTYSVNNGNDTCLLATMGLQLNITQDKVASVININPNTTHSTGSCRSHTALLRLNSSTIKYLDFVFAVKNENRFYLKEVNISMYLVNGSVFSIANNNLSYWDAPLGSSYMCNKEQTVSVSGAFQINTFDLRVQPFNVTQGKYSTAEECSADSDLNFLIPVAVGVALGFLIIVVFISYMIGRRKSRTGYQSV

SEQ ID NO: 97 - DNA, 1347 bp, Homo sapiens
  CDS (1)..(1347)
atgatccccaccttcacggctctgctctgcctcgggctgagtctgggccccaggacccacatgcaggcagggcccctccccaaacccaccctctgggctgagccaggctctgtgatcagctgggggaactctgtgaccatctggtgtcaggggaccctggaggctcgggagtaccgtctggataaagaggaaagcccagcaccctgggacagacagaacccactggagcccaagaacaaggccagattctccatcccatccatgacagaggactatgcagggagataccgctgttactatcgcagccctgtaggctggtcacagcccagtgaccccctggagctggtgatgacaggagcctacagtaaacccaccctttcagccctgccgagtcctcttgtgacctcaggaaagagcgtgaccctgctgtgtcagtcacggagcccaatggacacttttcttctgatcaaggagcgggcagcccatcccctactgcatctgagatcagagcacggagctcagcagcaccaggctgaattccccatgagtcctgtgacctcagtgcacggggggacctacaggtgcttcagctcacacggcttctcccactacctgctgtcacaccccagtgaccccctggagctcatagtctcaggatccttggagggtcccaggccctcacccacaaggtccgtctcaacagctgcaggccctgaggaccagcccctcatgcctacagggtcagtcccccacagtggtctgagaaggcactgggaggtactgatcggggtcttggtggtctccatcctgcttctctccctcctcctcttcctcctcctccaacactggcgtcagggaaaacacaggacattggcccagagacaggctgatttccaacgtcctccaggggctgccgagccagagcccaaggacgggggcctacagaggaggtccagcccagctgctgacgtccagggagaaaacttctgtgctgccgtgaagaacacacagcctgaggacggggtggaaatggacactcggcagagcccacacgatgaagacccccaggcagtgacgtatgccaaggtgaaacactccagacctaggagagaaatggcctctcctccctccccactgtctggggaattcctggacacaaaggacagacaggcagaagaggacagacagatggacactgaggctgctgcatctgaagccccccaggatgtgacctacgcccggctgcacagctttaccctcagacagaaggcaactgagcctcctccatcccaggaaggggcctctccagctgagcccagtgtctatgccactctggccatccactaa

SEQ ID NO: 98 - protein, 448 aa, Homo sapiens
MIPTFTALLCLGLSLGPRTHMQAGPLPKPTLWAEPGSVISWGNSVTIWCQGTLEAREYRLDKEESPAPWDRQNPLEPKNKARFSIPSMTEDYAGRYRCYYRSPVGWSQPSDPLELVMTGAYSKPTLSALPSPLVTSGKSVTLLCQSRSPMDTFLLIKERAAHPLLHLRSEHGAQQHQAEFPMSPVTSVHGGTYRCFSSHGFSHYLLSHPSDPLELIVSGSLEGPRPSPTRSVSTAAGPEDQPLMPTGSVPHSGLRRHWEVLIGVLVVSILLLSLLLFLLLQHWRQGKHRTLAQRQADFQRPPGAAEPEPKDGGLQRRSSPAADVQGENFCAAVKNTQPEDGVEMDTRQSPHDEDPQAVTYAKVKHSRPRREMASPPSPLSGEFLDTKDRQAEEDRQMDTEAAASEAPQDVTYARLHSFTLRQKATEPPPSQEGASPAEPSVYATLAIH

SEQ ID NO: 99 - DNA, 1347 bp, Homo sapiens
  CDS (1)..(1347)
atgatccccaccttcacggctctgctctgcctcgggctgagtctgggccccaggacccacatgcaggcagggcccctccccaaacccaccctctgggctgagccaggctctgtgatcagctgggggaactctgtgaccatctggtgtcaggggaccctggaggctcgggagtaccgtctggataaagaggaaagcccagcaccctgggacagacagaacccactggagcccaagaacaaggccagattctccatcccatccatgacagaggactatgcagggagataccgctgttactatcgcagccctgtaggctggtcacagcccagtgaccccctggagctggtgatgacaggagcctacagtaaacccaccctttcagccctgccgagtcctcttgtgacctcaggaaagagcgtgaccctgctgtgtcagtcacggagcccaatggacactttccttctgatcaaggagcgggcagcccatcccctactgcatctgagatcagagcacggagctcagcagcaccaggctgaattccccatgagtcctgtgacctcagtgcacggggggacctacaggtgcttcagctcacacggcttctcccactacctgctgtcacaccccagtgaccccctggagctcatagtctcaggatccttggaggatcccaggccctcacccacaaggtccgtctcaacagctgcaggccctgaggaccagcccctcatgcctacagggtcagtcccccacagtggtctgagaaggcactgggaggtactgatcggggtcttggtggtctccatcctgcttctctccctcctcctcttcctcctcctccaacactggcgtcagggaaaacacaggacattggcccagagacaggctgatttccaacgtcctccaggggctgccgagccagagcccaaggacgggggcctacagaggaggtccagcccagctgctgacgtccagggagaaaacttctgtgctgccgtgaagaacacacagcctgaggacggggtggaaatggacactcggcagagcccacacgatgaagacccccaggcagtgacgtatgccaaggtgaaacactccagacctaggagagaaatggcctctcctccctccccactgtctggggaattcctggacacaaaggacagacaggcagaagaggacagacagatggacactgaggctgctgcatctgaagccccccaggatgtgacctacgcccagctgcacagctttaccctcagacagaaggcaactgagcctcctccatcccaggaaggggcctctccagctgagcccagtgtctatgccactctggccatccactaa

SEQ ID NO: 100 - protein, 448 aa, Homo sapiens
MIPTFTALLCLGLSLGPRTHMQAGPLPKPTLWAEPGSVISWGNSVTIWCQGTLEAREYRLDKEESPAPWDRQNPLEPKNKARFSIPSMTEDYAGRYRCYYRSPVGWSQPSDPLELVMTGAYSKPTLSALPSPLVTSGKSVTLLCQSRSPMDTFLLIKERAAHPLLHLRSEHGAQQHQAEFPMSPVTSVHGGTYRCFSSHGFSHYLLSHPSDPLELIVSGSLEDPRPSPTRSVSTAAGPEDQPLMPTGSVPHSGLRRHWEVLIGVLVVSILLLSLLLFLLLQHWRQGKHRTLAQRQADFQRPPGAAEPEPKDGGLQRRSSPAADVQGENFCAAVKNTQPEDGVEMDTRQSPHDEDPQAVTYAKVKHSRPRREMASPPSPLSGEFLDTKDRQAEEDRQMDTEAAASEAPQDVTYAQLHSFTLRQKATEPPPSQEGASPAEPSVYATLAIH

SEQ ID NO: 101 - DNA, 1350 bp, Homo sapiens
  CDS (1)..(1350)
atgatccccaccttcacggctctgctctgcctcgggctgagtctgggccccaggacccacatgcaggcagggcccctccccaaacccaccctctgggctgagccaggctctgtgatcagctgggggaactctgtgaccatctggtgtcaggggaccctggaggctcgggagtaccgtctggataaagaggaaagcccagcaccctgggacagacagaacccactggagcccaagaacaaggccagattctccatcccatccatgacagaggactatgcagggagataccgctgttactatcgcagccctgtaggctggtcacagcccagtgaccccctggagctggtgatgacaggagcctacagtaaacccaccctttcagccctgccgagtcctcttgtgacctcaggaaagagcgtgaccctgctgtgtcagtcacggagcccaatggacactttccttctgatcaaggagcgggcagcccatcccctactgcatctgagatcagagcacggagctcagcagcaccaggctgaattccccatgagtcctgtgacctcagtgcacggggggacctacaggtgcttcagctcacacggcttctcccactacctgctgtcacaccccagtgaccccctggagctcatagtctcaggatccttggaggatcccaggccctcacccacaaggtccgtctcaacagctgcaggccctgaggaccagcccctcatgcctacagggtcagtcccccacagtggtctgagaaggcactgggaggtactgatcggggtcttggtggtctccatcctgcttctctccctcctcctcttcctcctcctccaacactggcgtcagggaaaacacaggacattggcccagagacaggctgatttccaacgtcctccaggggctgccgagccagagcccaaggacgggggcctacagaggaggtccagcccagctgctgacgtccagggagaaaacttctcaggtgctgccgtgaagaacacacagcctgaggacggggtggaaatggacactcggcagagcccacacgatgaagacccccaggcagtgacgtatgccaaggtgaaacactccagacctaggagagaaatggcctctcctccctccccactgtctggggaattcctggacacaaaggacagacaggcagaagaggacagacagatggacactgaggctgctgcatctgaagccccccaggatgtgacctacgcccagctgcacagctttaccctcagacagaaggcaactgagcctcctccatcccaggaaggggcctctccagctgagcccagtgtctatgccactctggccatccactaa

SEQ ID NO: 102 - protein, 449 aa, Homo sapiens
MIPTFTALLCLGLSLGPRTHMQAGPLPKPTLWAEPGSVISWGNSVTIWCQGTLEAREYRLDKEESPAPWDRQNPLEPKNKARFSIPSMTEDYAGRYRCYYRSPVGWSQPSDPLELVMTGAYSKPTLSALPSPLVTSGKSVTLLCQSRSPMDTFLLIKERAAHPLLHLRSEHGAQQHQAEFPMSPVTSVHGGTYRCFSSHGFSHYLLSHPSDPLELIVSGSLEDPRPSPTRSVSTAAGPEDQPLMPTGSVPHSGLRRHWEVLIGVLVVSILLLSLLLFLLLQHWRQGKHRTLAQRQADFQRPPGAAEPEPKDGGLQRRSSPAADVQGENFSGAAVKNTQPEDGVEMDTRQSPHDEDPQAVTYAKVKHSRPRREMASPPSPLSGEFLDTKDRQAEEDRQMDTEAAASEAPQDVTYAQLHSFTLRQKATEPPPSQEGASPAEPSVYATLAIH

SEQ ID NO: 103 - DNA, 1344 bp, Homo sapiens
  CDS (1)..(1344)
atgatccccaccttcacggctctgctctgcctcgggctgagtctgggccccaggacccacatgcaggcagggcccctccccaaacccaccctctgggctgagccaggctctgtgatcagctgggggaactctgtgaccatctggtgtcaggggaccctggaggctcgggagtaccgtctggataaagaggaaagcccagcaccctgggacagacagaacccactggagcccaagaacaaggccagattctccatcccatccatgacagaggactatgcagggagataccgctgttactatcgcagccctgtaggctggtcacagcccagtgaccccctggagctggtgatgacaggagcctacagtaaacccaccctttcagccctgccgagtcctcttgtgacctcaggaaagagcgtgaccctgctgtgtcagtcacggagcccaatggacactttccttctgatcaaggagcgggcagcccatcccctactgcatctgagatcagagcacggagctcagcagcaccaggctgaattccccatgagtcctgtgacctcagtgcacggggggacctacaggtgcttcagctcacacggcttctcccactacctgctgtcacaccccagtgaccccctggagctcatagtctcaggatccttggaggatcccaggccctcacccacaaggtccgtctcaacagctgcaggccctgaggaccagcccctcatgcctacagggtcagtcccccacagtggtctgagaaggcactgggaggtactgatcggggtcttggtggtctccatcctgcttctctccctcctcctcttcctcctcctccaacactggcgtcagggaaaacacaggacattggcccagagacaggctgatttccaacgtcctccaggggctgccgagccagagcccaaggacgggggcctacagaggaggtccagcccagctgctgacgtccagggagaaaacttctgtgctgccgtgaagaacacacagcctgaggacggggtggaaatggacactcggagcccacacgatgaagacccccaggcagtgacgtatgccaaggtgaaacactccagacctaggagagaaatggcctctcctccctccccactgtctggggaattcctggacacaaaggacagacaggcagaagaggacagacagatggacactgaggctgctgcatctgaagccccccaggatgtgacctacgcccagctgcacagctttaccctcagacagaaggcaactgagcctcctccatcccaggaaggggcctctccagctgagcccagtgtctatgccactctggccatccactaa

SEQ ID NO: 104 - protein, 447 aa, Homo sapiens
MIPTFTALLCLGLSLGPRTHMQAGPLPKPTLWAEPGSVISWGNSVTIWCQGTLEAREYRLDKEESPAPWDRQNPLEPKNKARFSIPSMTEDYAGRYRCYYRSPVGWSQPSDPLELVMTGAYSKPTLSALPSPLVTSGKSVTLLCQSRSPMDTFLLIKERAAHPLLHLRSEHGAQQHQAEFPMSPVTSVHGGTYRCFSSHGFSHYLLSHPSDPLELIVSGSLEDPRPSPTRSVSTAAGPEDQPLMPTGSVPHSGLRRHWEVLIGVLVVSILLLSLLLFLLLQHWRQGKHRTLAQRQADFQRPPGAAEPEPKDGGLQRRSSPAADVQGENFCAAVKNTQPEDGVEMDTRSPHDEDPQAVTYAKVKHSRPRREMASPPSPLSGEFLDTKDRQAEEDRQMDTEAAASEAPQDVTYAQLHSFTLRQKATEPPPSQEGASPAEPSVYATLAIH

SEQ ID NO: 105 - DNA, 2640 bp, Homo sapiens
  CDS (1)..(2640)
atggggcgcctggcctcgaggccgctgctgctggcgctcctgtcgttggctctttgccgagggcgtgtggtgagagtccccacagcgaccctggttcgagtggtgggcactgagctggtcatcccctgcaacgtcagtgactatgatggccccagcgagcaaaactttgactggagcttctcatctttggggagcagctttgtggagcttgcaagcacctgggaggtggggttcccagcccagctgtaccaggagcggctgcagaggggcgagatcctgttaaggcggactgccaacgacgccgtggagctccacataaagaacgtccagccttcagaccaaggccactacaaatgttcaacccccagcacagatgccactgtccagggaaactatgaggacacagtgcaggttaaagtgctggccgactccctgcacgtgggccccagcgcgcggcccccgccgagcctgagcctgcgggagggggagcccttcgagctgcgctgcaccgccgcctccgcctcgccgctgcacacgcacctggcgctgctgtgggaggtgcaccgcggcccggccaggcggagcgtcctcgccctgacccacgagggcaggttccacccgggcctggggtacgagcagcgctaccacagtggggacgtgcgcctcgacaccgtgggcagcgacgcctaccgcctctcagtgtcccgggctctgtctgccgaccagggctcctacaggtgtatcgtcagcgagtggatcgccgagcagggcaactggcaggaaatccaagaaaaggccgtggaagttgccaccgtggtgatccagccatcagttctgcgagcagctgtgcccaagaatgtgtctgtggctgaaggaaaggaactggacctgacctgtaacatcacaacagaccgagccgatgacgtccggcccgaggtgacgtggtccttcagcaggatgcctgacagcaccctacctggctcccgcgtgttggcgcggcttgaccgtgattccctggtgcacagctcgcctcatgttgctttgagtcatgtggatgcacgctcctaccatttactggttcgggatgttagcaaagaaaactctggctactattactgccacgtgtccctgtgggcacccggacacaacaggagctggcacaaagtggcagaggccgtgtcttccccagctggtgtgggtgtgacctggctagaaccagactaccaggtgtacctgaatgcttccaaggtccccgggtttgcggatgaccccacagagctggcatgccgggtggtggacacgaagagtggggaggcgaatgtccgattcacggtttcgtggtactacaggatgaaccggcgcagcgacaatgtggtgaccagcgagctgcttgcagtcatggacggggactggacgctaaaatatggagagaggagcaagcagcgggcccaggatggagactttattttttctaaggaacatacagacacgttcaatttccggatccaaaggactacagaggaagacagaggcaattattactgtgttgtgtctgcctggaccaaacagcggaacaacagctgggtgaaaagcaaggatgtcttctccaagcctgttaacatattttgggcattagaagattccgtgcttgtggtgaaggcgaggcagccaaagcctttctttgctgccggaaatacatttgagatgacttgcaaagtatcttccaagaatattaagtcgccacgctactctgttctcatcatggctgagaagcctgtcggcgacctctccagtcccaatgaaacgaagtacatcatctctctggaccaggattctgtggtgaagctggagaattggacagatgcatcacgggtggatggcgttgttttagaaaaagtgcaggaggatgagttccgctatcgaatgtaccagactcaggtctcagacgcagggctgtaccgctgcatggtgacagcctggtctcctgtcaggggcagcctttggcgagaagcagcaaccagtctctccaatcctattgagatagacttccaaacctcaggtcctatatttaatgcttctgtgcattcagacacaccatcagtaattcggggagatctgatcaaattgttctgtatcatcactgtcgagggagcagcactggatccagatgacatggcctttgatgtgtcctggtttgcggtgcactcttttggcctggacaaggctcctgtgctcctgtcttccctggatcggaagggcatcgtgaccacctcccggagggactggaagagcgacctcagcctggagcgcgtgagtgtgctggaattcttgctgcaagtgcatggctccgaggaccaggactttggcaactactactgttccgtgactccatgggtgaagtcaccaacaggttcctggcagaaggaggcagagatccactccaagcccgtttttataactgtgaagatggatgtgctgaacgccttcaagtatcccttgctgatcggcgtcggtctgtccacggtcatcgggctcctgtcctgtctcatcgggtactgcagctcccactggtgttgtaagaaggaggttcaggagacacggcgcgagcgccgcaggctcatgtcgatggagatggactag

SEQ ID NO: 106 - protein, 879 aa, Homo sapiens
MGRLASRPLLLALLSLALCRGRVVRVPTATLVRVVGTELVIPCNVSDYDGPSEQNFDWSFSSLGSSFVELASTWEVGFPAQLYQERLQRGEILLRRTANDAVELHIKNVQPSDQGHYKCSTPSTDATVQGNYEDTVQVKVLADSLHVGPSARPPPSLSLREGEPFELRCTAASASPLHTHLALLWEVHRGPARRSVLALTHEGRFHPGLGYEQRYHSGDVRLDTVGSDAYRLSVSRALSADQGSYRCIVSEWIAEQGNWQEIQEKAVEVATVVIQPSVLRAAVPKNVSVAEGKELDLTCNITTDRADDVRPEVTWSFSRMPDSTLPGSRVLARLDRDSLVHSSPHVALSHVDARSYHLLVRDVSKENSGYYYCHVSLWAPGHNRSWHKVAEAVSSPAGVGVTWLEPDYQVYLNASKVPGFADDPTELACRVVDTKSGEANVRFTVSWYYRMNRRSDNVVTSELLAVMDGDWTLKYGERSKQRAQDGDFIFSKEHTDTFNFRIQRTTEEDRGNYYCVVSAWTKQRNNSWVKSKDVFSKPVNIFWALEDSVLVVKARQPKPFFAAGNTFEMTCKVSSKNIKSPRYSVLIMAEKPVGDLSSPNETKYIISLDQDSVVKLENWTDASRVDGVVLEKVQEDEFRYRMYQTQVSDAGLYRCMVTAWSPVRGSLWREAATSLSNPIEIDFQTSGPIFNASVHSDTPSVIRGDLIKLFCIITVEGAALDPDDMAFDVSWFAVHSFGLDKAPVLLSSLDRKGIVTTSRRDWKSDLSLERVSVLEFLLQVHGSEDQDFGNYYCSVTPWVKSPTGSWQKEAEIHSKPVFITVKMDVLNAFKYPLLIGVGLSTVIGLLSCLIGYCSSHWCCKKEVQETRRERRRLMSMEMD

SEQ ID NO: 107 - DNA, 1287 bp, Homo sapiens
  CDS (1)..(1287)
atggcagtgggggccagtggtctagaaggagataagatggctggtgccatgcctctgcaactcctcctgttgctgatcctactgggccctggcaacagcttgcagctgtgggacacctgggcagatgaagccgagaaagccttgggtcccctgcttgcccgggaccggagacaggccaccgaatatgagtacctagattatgatttcctgccagaaacggagcctccagaaatgctgaggaacagcactgacaccactcctctgactgggcctggaacccctgagtctaccactgtggagcctgctgcaaggcgttctactggcctggatgcaggaggggcagtcacagagctgaccacggagctggccaacatggggaacctgtccacggattcagcagctatggagatacagaccactcaaccagcagccacggaggcacagaccactcaaccagtgcccacggaggcacagaccactccactggcagccacagaggcacagacaactcgactgacggccacggaggcacagaccactccactggcagccacagaggcacagaccactccaccagcagccacggaagcacagaccactcaacccacaggcctggaggcacagaccactgcaccagcagccatggaggcacagaccactgcaccagcagccatggaagcacagaccactccaccagcagccatggaggcacagaccactcaaaccacagccatggaggcacagaccactgcaccagaagccacggaggcacagaccactcaacccacagccacggaggcacagaccactccactggcagccatggaggccctgtccacagaacccagtgccacagaggccctgtccatggaacctactaccaaaagaggtctgttcatacccttttctgtgtcctctgttactcacaagggcattcccatggcagccagcaatttgtccgtcaactacccagtgggggccccagaccacatctctgtgaagcagtgcctgctggccatcctaatcttggcgctggtggccactatcttcttcgtgtgcactgtggtgctggcggtccgcctctcccgcaagggccacatgtaccccgtgcgtaattactcccccaccgagatggtctgcatctcatccctgttgcctgatgggggtgaggggccctctgccacagccaatgggggcctgtccaaggccaagagcccgggcctgacgccagagcccagggaggaccgtgagggggatgacctcaccctgcacagcttcctcccttag

SEQ ID NO: 108 - protein, 428 aa, Homo sapiens
MAVGASGLEGDKMAGAMPLQLLLLLILLGPGNSLQLWDTWADEAEKALGPLLARDRRQATEYEYLDYDFLPETEPPEMLRNSTDTTPLTGPGTPESTTVEPAARRSTGLDAGGAVTELTTELANMGNLSTDSAAMEIQTTQPAATEAQTTQPVPTEAQTTPLAATEAQTTRLTATEAQTTPLAATEAQTTPPAATEAQTTQPTGLEAQTTAPAAMEAQTTAPAAMEAQTTPPAAMEAQTTQTTAMEAQTTAPEATEAQTTQPTATEAQTTPLAAMEALSTEPSATEALSMEPTTKRGLFIPFSVSSVTHKGIPMAASNLSVNYPVGAPDHISVKQCLLAILILALVATIFFVCTVVLAVRLSRKGHMYPVRNYSPTEMVCISSLLPDGGEGPSATANGGLSKAKSPGLTPEPREDREGDDLTLHSFLP

SEQ ID NO: 109 - DNA, 1239 bp, Homo sapiens
  CDS (1)..(1239)
atgcctctgcaactcctcctgttgctgatcctactgggccctggcaacagcttgcagctgtgggacacctgggcagatgaagccgagaaagccttgggtcccctgcttgcccgggaccggagacaggccaccgaatatgagtacctagattatgatttcctgccagaaacggagcctccagaaatgctgaggaacagcactgacaccactcctctgactgggcctggaacccctgagtctaccactgtggagcctgctgcaaggcgttctactggcctggatgcaggaggggcagtcacagagctgaccacggagctggccaacatggggaacctgtccacggattcagcagctatggagatacagaccactcaaccagcagccacggaggcacagaccactcaaccagtgcccacggaggcacagaccactccactggcagccacagaggcacagacaactcgactgacggccacggaggcacagaccactccactggcagccacagaggcacagaccactccaccagcagccacggaagcacagaccactcaacccacaggcctggaggcacagaccactgcaccagcagccatggaggcacagaccactgcaccagcagccatggaagcacagaccactccaccagcagccatggaggcacagaccactcaaaccacagccatggaggcacagaccactgcaccagaagccacggaggcacagaccactcaacccacagccacggaggcacagaccactccactggcagccatggaggccctgtccacagaacccagtgccacagaggccctgtccatggaacctactaccaaaagaggtctgttcatacccttttctgtgtcctctgttactcacaagggcattcccatggcagccagcaatttgtccgtcaactacccagtgggggccccagaccacatctctgtgaagcagtgcctgctggccatcctaatcttggcgctggtggccactatcttcttcgtgtgcactgtggtgctggcggtccgcctctcccgcaagggccacatgtaccccgtgcgtaattactcccccaccgagatggtctgcatctcatccctgttgcctgatgggggtgaggggccctctgccacagccaatgggggcctgtccaaggccaagagcccgggcctgacgccagagcccagggaggaccgtgagggggatgacctcaccctgcacagcttcctcccttag

SEQ ID NO: 110 - protein, 412 aa, Homo sapiens
MPLQLLLLLILLGPGNSLQLWDTWADEAEKALGPLLARDRRQATEYEYLDYDFLPETEPPEMLRNSTDTTPLTGPGTPESTTVEPAARRSTGLDAGGAVTELTTELANMGNLSTDSAAMEIQTTQPAATEAQTTQPVPTEAQTTPLAATEAQTTRLTATEAQTTPLAATEAQTTPPAATEAQTTQPTGLEAQTTAPAAMEAQTTAPAAMEAQTTPPAAMEAQTTQTTAMEAQTTAPEATEAQTTQPTATEAQTTPLAAMEALSTEPSATEALSMEPTTKRGLFIPFSVSSVTHKGIPMAASNLSVNYPVGAPDHISVKQCLLAILILALVATIFFVCTVVLAVRLSRKGHMYPVRNYSPTEMVCISSLLPDGGEGPSATANGGLSKAKSPGLTPEPREDREGDDLTLHSFLP

SEQ ID NO: 111 - DNA, 1146 bp, Artificial Sequence
  Sequence from vector
  CDS (1)..(1146)
ctcgaacttaatttgaccgattcagagaatgccacatgcctttatgcgaaatggcagatgaatttcactgttcggtatgaaaccacaaataaaacttataaaaccgttaccataagcgaccatggaactgtgacctataatggaagcatatgtggagatgatcagaatggtcccaaaattgctgttcagttcggacctggtttctcctggattgctaattttactaaggcagcctctacctattccatagactcagtttcttttagttacaacacaggggataacacaacgtttcctgatgccgaagataaaggcatactcaccgttgatgaactcttggccatcagaatacctcttaatgacctgtttagatgcaatagcctctccaccctggagaagaatgatgtggtacaacactactgggatgtgttggttcaagcttttgtacaaaatgggaccgtctctacaaatgagttcctctgtgataaagacaaaaccagtactgtggcaccaaccatacacacaacagtgccatctccaacgaccacccctacacccaaggagaaacctgaagccggtacatattcagtgaataatggaaatgatacatgccttctggccaccatgggccttcagctcaacatcactcaggataaggtcgcttcagtcattaacattaaccccaatactactcactctacaggctcttgcaggagtcacacggcgctcctgcggttgaatagcagcaccattaagtatcttgactttgtctttgctgtcaagaatgagaacagattttatctgaaagaggtcaacatctctatgtatttggtcaatgggagtgtgttctccattgctaataacaatctcagctactgggatgcccctctgggttcttcctatatgtgcaacaaagagcagactgtttcagtgtccggcgcatttcagattaatacttttgatcttcgggtgcagcctttcaatgtgacacaaggaaagtattccaccgcccaagagtgttctttggatgatgacaccatactgatccccatcattgtaggtgccggcctgagcggccttattatcgttatcgtcattgcatacgtgattggacggcggaaatcttatgccggttatcagacgctt

SEQ ID NO: 112 - protein, 382 aa, Artificial Sequence [sequence omitted]

SEQ ID NO: 113 - DNA, 2859 bp, Artificial Sequence
  Sequence from vector
  CDS (1)..(2859)
gcacgcgtgaataaacataaaccgtggttggaaccaacatatcatgggatcgttaccgaaaatgataatacagtacttctggatccacctctcattgctttggacaaggacgcacccctcaggttcgctgaatcattcgaagttaccgttacgaaggaaggggaaatatgcggtttcaagatccatggtcaaaacgttcctttcgacgccgtcgtggttgacaagagcaccggcgaaggggttataagatctaaggaaaagctcgattgcgaacttcaaaaggattacagctttactatacaagcgtacgactgcggcaaagggcccgacgggacaaatgttaagaaatcccacaaggccacggtccacatccaagtcaatgatgttaacgaatatgcacctgttttcaaagagaaaagctataaggctactgtgatagaaggaaaacaatatgatagtatcctgagagtcgaagctgtcgacgcagattgtagcccacaattttcccaaatatgttcctatgagattataacacctgatgtccctttcaccgtagataaggacggatacatcaagaatactgaaaagctgaattatggtaaagagcaccagtacaaactcacggtgacggcgtacgattgcggaaagaagcgtgcaactgaggacgtacttgttaaaattagtatcaaaccgacgtgtacaccaggctggcagggctggaataatcggatcgaatacgaacccggaacaggagcactggctgtgttccctaacattcatctcgaaacttgcgatgaacctgtggcaagcgtccaagctacggtagaactggagacatctcatattggtaagggatgtgatagagatacttatagcgagaaaagccttcatcgcttgtgcggcgccgcagccggaacagcagaactcttgccttctccctctggcagccttaattggactatgggattgcctactgataacggtcatgattccgatcaagtcttcgaatttaatggaacacaagctgtacgcattcctgacggagtggtaagtgtttctccgaaggaaccctttacaattagcgtatggatgcgccacggcccctttggacggaagaaagaaactatcctgtgtagctcagacaagactgacatgaaccgccatcattattctttgtacgtacatggttgtcgtcttattttcctgtttcgccaagacccatccgaagaaaagaagtataggcccgccgaatttcattggaaactcaaccaagtgtgcgacgaagagtggcatcattatgttctgaacgttgagtttccatccgtcacactgtacgtcgacggtaccagccatgaaccatttagtgtcacagaagactatcccctgcacccgagtaaaatcgagacgcaactggttgtcggcgcatgttggcaggaatttagtggcgtcgagaacgataacgagaccgaacccgtcaccgtagcgtccgccggcggggatctccatatgacgcaattctttcggggtaacttggccgggctgacactgcgctctggcaagctggctgacaagaaagttattgattgcttgtacacgtgtaaagaaggccttgatctccaagttctggaagattcaggacgaggggtccaaattcaggctcatccatcccaactggtgcttacactggaaggcgaggatctgggagagctggacaaagctatgcaacatatttcctatctcaatagtcgccaatttccaacacctggcatccgacgactgaagattacgtcaaccattaaatgcttcaatgaagcaacatgtatcagcgtgccacctgtggacggatatgttatggtactgcaacctgaagaaccaaagatttccctctctggggttcatcacttcgcaagggccgcaagtgagttcgagtcctctgagggagtctttctctttcccgaactgcggataataagtactattacaagggaagtcgaaccagagggagatggagccgaagatccaaccgtgcaggagtctctcgtatcagaagaaattgtccatgatcttgacacgtgcgaagtgacagtagaaggggaagaactcaatcatgaacaagaatcattggaagtagatatggcacgattgcaacaaaagggaatcgaggtctcctcatccgagcttggtatgacttttactggagtagatacgatggcttcctatgaagaagtgctgcatcttctcagataccgcaattggcacgcgcgttctctgctggacagaaaattcaaactgatttgtagcgaacttaacggacggtacatatctaatgagttcaaagtagaagttaacgtgattcatactgcaaatcctatggagcatgcggccgctgccgccgctcaacctcaatttgtccatcccgagcataggtcattcgtggatctctctggtcataatttggcaaatccacatccctttgctgtggttccatctacagcaactgtagttattgtagtatgtgtgtcctttctcgtctttatgatcatattgggcgtcttccgcataagagcggcccacaggagaacaatgagggaccaagatacaggaaaagaaaatgaaatggattgggatgatagcgcactcacaataacggtgaatccaatggaaacgtacgaagatcaacattctagcgaagaagaagaagaggaagaggaagaggaagagtcagaagatggagaagaggaagacgatattacatcagctgaaagcgaatcttcagaagaagaagaaggtgaacaaggtgatcctcaaaatgccacacgccaacaacaactcgaatgggacgattctacattgtcctat

SEQ ID NO: 114 - protein, 953 aa, Artificial Sequence
  Synthetic Construct
ARVNKHKPWLEPTYHGIVTENDNTVLLDPPLIALDKDAPLRFAESFEVTVTKEGEICGFKIHGQNVPFDAVVVDKSTGEGVIRSKEKLDCELQKDYSFTIQAYDCGKGPDGTNVKKSHKATVHIQVNDVNEYAPVFKEKSYKATVIEGKQYDSILRVEAVDADCSPQFSQICSYEIITPDVPFTVDKDGYIKNTEKLNYGKEHQYKLTVTAYDCGKKRATEDVLVKISIKPTCTPGWQGWNNRIEYEPGTGALAVFPNIHLETCDEPVASVQATVELETSHIGKGCDRDTYSEKSLHRLCGAAAGTAELLPSPSGSLNWTMGLPTDNGHDSDQVFEFNGTQAVRIPDGVVSVSPKEPFTISVWMRHGPFGRKKETILCSSDKTDMNRHHYSLYVHGCRLIFLFRQDPSEEKKYRPAEFHWKLNQVCDEEWHHYVLNVEFPSVTLYVDGTSHEPFSVTEDYPLHPSKIETQLVVGACWQEFSGVENDNETEPVTVASAGGDLHMTQFFRGNLAGLTLRSGKLADKKVIDCLYTCKEGLDLQVLEDSGRGVQIQAHPSQLVLTLEGEDLGELDKAMQHISYLNSRQFPTPGIRRLKITSTIKCFNEATCISVPPVDGYVMVLQPEEPKISLSGVHHFARAASEFESSEGVFLFPELRIISTITREVEPEGDGAEDPTVQESLVSEEIVHDLDTCEVTVEGEELNHEQESLEVDMARLQQKGIEVSSSELGMTFTGVDTMASYEEVLHLLRYRNWHARSLLDRKFKLICSELNGRYISNEFKVEVNVIHTANPMEHAAAAAAQPQFVHPEHRSFVDLSGHNLANPHPFAVVPSTATVVIVVCVSFLVFMIILGVFRIRAAHRRTMRDQDTGKENEMDWDDSALTITVNPMETYEDQHSSEEEEEEEEEEESEDGEEEDDITSAESESSEEEEGEQGDPQNATRQQQLEWDDSTLSY

SEQ ID NO: 115 - DNA, 1179 bp, Artificial Sequence
  Sequence from vector
  CDS (1)..(1179)
ttggaacttaatttgacagattcagaaaatgccacttgcctttatgcaaaatggcagatgaatttcacagtacgctatgaaactacaaataaaacttataaaactgtaaccatttcagaccatggcactgtgacatataatggaagcatttgtggggatgatcagaatggtcccaaaatagcagtgcagttcggacctggcttttcctggattgcgaattttaccaaggcagcatctacttattcaattgacagcgtctcattttcctacaacactggtgataacacaacatttcctgatgctgaagataaaggaattcttactgttgatgaacttttggccatcagaattccattgaatgacctttttagatgcaatagtttatcaactttggaaaagaatgatgttgtccaacactactgggatgttcttgtacaagcttttgtccaaaatggcacagtgagcacaaatgagttcctgtgtgataaagacaaaacttcaacagtggcacccaccatacacaccactgtgccatctcctactacaacacctactccaaaggaaaaaccagaagctggaacctattcagttaataatggcaatgatacttgtctgctggctaccatggggctgcagctgaacatcactcaggataaggttgcttcagttattaacatcaaccccaatacaactcactccacaggcagctgccgttctcacactgctctacttagactcaatagcagcaccattaagtatctagactttgtctttgctgtgaaaaatgaaaaccgattttatctgaaggaagtgaacatcagcatgtatttggttaatggctccgttttcagcattgcaaataacaatctcagctactgggatgcccccctgggaagttcttatatgtgcaacaaagagcagactgtttcagtgtctggagcatttcagataaatacctttgatctaagggttcagcctttcaatgtgacacaaggaaagtattctacagcccaagagtgttcgctggatgatgacaccattctaatcccaattatagttggtgctggtctttcaggcttgattatcgttatagtgattgctagctcccactggtgttgtaagaaggaggttcaggagacacggcgcgagcgccgcaggctcatgtcgatggagatggac

SEQ ID NO: 116 - protein, 393 aa, Artificial Sequence
  Synthetic Construct
LELNLTDSENATCLYAKWQMNFTVRYETTNKTYKTVTISDHGTVTYNGSICGDDQNGPKIAVQFGPGFSWIANFTKAASTYSIDSVSFSYNTGDNTTFPDAEDKGILTVDELLAIRIPLNDLFRCNSLSTLEKNDVVQHYWDVLVQAFVQNGTVSTNEFLCDKDKTSTVAPTIHTTVPSPTTTPTPKEKPEAGTYSVNNGNDTCLLATMGLQLNITQDKVASVININPNTTHSTGSCRSHTALLRLNSSTIKYLDFVFAVKNENRFYLKEVNISMYLVNGSVFSIANNNLSYWDAPLGSSYMCNKEQTVSVSGAFQINTFDLRVQPFNVTQGKYSTAQECSLDDDTILIPIIVGAGLSGLIIVIVIASSHWCCKKEVQETRRERRRLMSMEMD

SEQ ID NO: 117 - DNA, 1212 bp, Artificial Sequence
  Sequence from vector
  CDS (1)..(1212)
ttggaacttaatttgacagattcagaaaatgccacttgcctttatgcaaaatggcagatgaatttcacagtacgctatgaaactacaaataaaacttataaaactgtaaccatttcagaccatggcactgtgacatataatggaagcatttgtggggatgatcagaatggtcccaaaatagcagtgcagttcggacctggcttttcctggattgcgaattttaccaaggcagcatctacttattcaattgacagcgtctcattttcctacaacactggtgataacacaacatttcctgatgctgaagataaaggaattcttactgttgatgaacttttggccatcagaattccattgaatgacctttttagatgcaatagtttatcaactttggaaaagaatgatgttgtccaacactactgggatgttcttgtacaagcttttgtccaaaatggcacagtgagcacaaatgagttcctgtgtgataaagacaaaacttcaacagtggcacccaccatacacaccactgtgccatctcctactacaacacctactccaaaggaaaaaccagaagctggaacctattcagttaataatggcaatgatacttgtctgctggctaccatggggctgcagctgaacatcactcaggataaggttgcttcagttattaacatcaaccccaatacaactcactccacaggcagctgccgttctcacactgctctacttagactcaatagcagcaccattaagtatctagactttgtctttgctgtgaaaaatgaaaaccgattttatctgaaggaagtgaacatcagcatgtatttggttaatggctccgttttcagcattgcaaataacaatctcagctactgggatgcccccctgggaagttcttatatgtgcaacaaagagcagactgtttcagtgtctggagcatttcagataaatacctttgatctaagggttcagcctttcaatgtgacacaaggaaagtattctacagcccaagagtgttcgctggatgatgacaccattctaatcccaattatagttggtgctggtctttcaggcttgattatcgttatagtgattgctaagtgcggcttcttcaagcgagcccgcactcgcgccctgtatgaagctaagaggcagaaggcggagatgaagagccagccgtcagagacagagaggctgaccgacgactac

SEQ ID NO: 118 - protein, 404 aa, Artificial Sequence
  Synthetic Construct
LELNLTDSENATCLYAKWQMNFTVRYETTNKTYKTVTISDHGTVTYNGSICGDDQNGPKIAVQFGPGFSWIANFTKAASTYSIDSVSFSYNTGDNTTFPDAEDKGILTVDELLAIRIPLNDLFRCNSLSTLEKNDVVQHYWDVLVQAFVQNGTVSTNEFLCDKDKTSTVAPTIHTTVPSPTTTPTPKEKPEAGTYSVNNGNDTCLLATMGLQLNITQDKVASVININPNTTHSTGSCRSHTALLRLNSSTIKYLDFVFAVKNENRFYLKEVNISMYLVNGSVFSIANNNLSYWDAPLGSSYMCNKEQTVSVSGAFQINTFDLRVQPFNVTQGKYSTAQECSLDDDTILIPIIVGAGLSGLIIVIVIAKCGFFKRARTRALYEAKRQKAEMKSQPSETERLTDDY

SEQ ID NO: 119 - DNA, 1248 bp, Artificial Sequence
  Sequence from vector
  CDS (1)..(1248)
ttggaacttaatttgacagattcagaaaatgccacttgcctttatgcaaaatggcagatgaatttcacagtacgctatgaaactacaaataaaacttataaaactgtaaccatttcagaccatggcactgtgacatataatggaagcatttgtggggatgatcagaatggtcccaaaatagcagtgcagttcggacctggcttttcctggattgcgaattttaccaaggcagcatctacttattcaattgacagcgtctcattttcctacaacactggtgataacacaacatttcctgatgctgaagataaaggaattcttactgttgatgaacttttggccatcagaattccattgaatgacctttttagatgcaatagtttatcaactttggaaaagaatgatgttgtccaacactactgggatgttcttgtacaagcttttgtccaaaatggcacagtgagcacaaatgagttcctgtgtgataaagacaaaacttcaacagtggcacccaccatacacaccactgtgccatctcctactacaacacctactccaaaggaaaaaccagaagctggaacctattcagttaataatggcaatgatacttgtctgctggctaccatggggctgcagctgaacatcactcaggataaggttgcttcagttattaacatcaaccccaatacaactcactccacaggcagctgccgttctcacactgctctacttagactcaatagcagcaccattaagtatctagactttgtctttgctgtgaaaaatgaaaaccgattttatctgaaggaagtgaacatcagcatgtatttggttaatggctccgttttcagcattgcaaataacaatctcagctactgggatgcccccctgggaagttcttatatgtgcaacaaagagcagactgtttcagtgtctggagcatttcagataaatacctttgatctaagggttcagcctttcaatgtgacacaaggaaagtattctacagcccaagagtgttcgctggatgatgacaccattctaatcccaattatagttggtgctggtctttcaggcttgattatcgttatagtgattgctgtgatgcagagactctttccccgcatccctcacatgaaagaccccatcggtgacagcttccaaaacgacaagctggtggtctgggaggcgggcaaagccggcctggaggagtgtctggtgactgaagtacaggtcgtgcagaaaact

SEQ ID NO: 120 - protein, 416 aa, Artificial Sequence
  Synthetic Construct
LELNLTDSENATCLYAKWQMNFTVRYETTNKTYKTVTISDHGTVTYNGSICGDDQNGPKIAVQFGPGFSWIANFTKAASTYSIDSVSFSYNTGDNTTFPDAEDKGILTVDELLAIRIPLNDLFRCNSLSTLEKNDVVQHYWDVLVQAFVQNGTVSTNEFLCDKDKTSTVAPTIHTTVPSPTTTPTPKEKPEAGTYSVNNGNDTCLLATMGLQLNITQDKVASVININPNTTHSTGSCRSHTALLRLNSSTIKYLDFVFAVKNENRFYLKEVNISMYLVNGSVFSIANNNLSYWDAPLGSSYMCNKEQTVSVSGAFQINTFDLRVQPFNVTQGKYSTAQECSLDDDTILIPIIVGAGLSGLIIVIVIAVMQRLFPRIPHMKDPIGDSFQNDKLVVWEAGKAGLEECLVTEVQVVQKT

SEQ ID NO: 121 - DNA, 1308 bp, Artificial Sequence
  Sequence from vector
  CDS (1)..(1308)
ttggaacttaatttgacagattcagaaaatgccacttgcctttatgcaaaatggcagatgaatttcacagtacgctatgaaactacaaataaaacttataaaactgtaaccatttcagaccatggcactgtgacatataatggaagcatttgtggggatgatcagaatggtcccaaaatagcagtgcagttcggacctggcttttcctggattgcgaattttaccaaggcagcatctacttattcaattgacagcgtctcattttcctacaacactggtgataacacaacatttcctgatgctgaagataaaggaattcttactgttgatgaacttttggccatcagaattccattgaatgacctttttagatgcaatagtttatcaactttggaaaagaatgatgttgtccaacactactgggatgttcttgtacaagcttttgtccaaaatggcacagtgagcacaaatgagttcctgtgtgataaagacaaaacttcaacagtggcacccaccatacacaccactgtgccatctcctactacaacacctactccaaaggaaaaaccagaagctggaacctattcagttaataatggcaatgatacttgtctgctggctaccatggggctgcagctgaacatcactcaggataaggttgcttcagttattaacatcaaccccaatacaactcactccacaggcagctgccgttctcacactgctctacttagactcaatagcagcaccattaagtatctagactttgtctttgctgtgaaaaatgaaaaccgattttatctgaaggaagtgaacatcagcatgtatttggttaatggctccgttttcagcattgcaaataacaatctcagctactgggatgcccccctgggaagttcttatatgtgcaacaaagagcagactgtttcagtgtctggagcatttcagataaatacctttgatctaagggttcagcctttcaatgtgacacaaggaaagtattctacagcccaagagtgttcgctggatgatgacaccattctaatcccaattatagttggtgctggtctttcaggcttgattatcgttatagtgattgctcgcctctcccgcaagggccacatgtaccccgtgcgtaattactcccccaccgagatggtctgcatctcatccctgttgcctgatgggggtgaggggccctctgccacagccaatgggggcctgtccaaggccaagagcccgggcctgacgccagagcccagggaggaccgtgagggggatgacctcaccctgcacagcttcctccct

SEQ ID NO: 122 - protein, 436 aa, Artificial Sequence
  Synthetic Construct
LELNLTDSENATCLYAKWQMNFTVRYETTNKTYKTVTISDHGTVTYNGSICGDDQNGPKIAVQFGPGFSWIANFTKAASTYSIDSVSFSYNTGDNTTFPDAEDKGILTVDELLAIRIPLNDLFRCNSLSTLEKNDVVQHYWDVLVQAFVQNGTVSTNEFLCDKDKTSTVAPTIHTTVPSPTTTPTPKEKPEAGTYSVNNGNDTCLLATMGLQLNITQDKVASVININPNTTHSTGSCRSHTALLRLNSSTIKYLDFVFAVKNENRFYLKEVNISMYLVNGSVFSIANNNLSYWDAPLGSSYMCNKEQTVSVSGAFQINTFDLRVQPFNVTQGKYSTAQECSLDDDTILIPIIVGAGLSGLIIVIVIARLSRKGHMYPVRNYSPTEMVCISSLLPDGGEGPSATANGGLSKAKSPGLTPEPREDREGDDLTLHSFLP

SEQ ID NO: 123 - DNA, 1239 bp, Artificial Sequence
  Sequence from vector
  CDS (1)..(1239)
ttggaacttaatttgacagattcagaaaatgccacttgcctttatgcaaaatggcagatgaatttcacagtacgctatgaaactacaaataaaacttataaaactgtaaccatttcagaccatggcactgtgacatataatggaagcatttgtggggatgatcagaatggtcccaaaatagcagtgcagttcggacctggcttttcctggattgcgaattttaccaaggcagcatctacttattcaattgacagcgtctcattttcctacaacactggtgataacacaacatttcctgatgctgaagataaaggaattcttactgttgatgaacttttggccatcagaattccattgaatgacctttttagatgcaatagtttatcaactttggaaaagaatgatgttgtccaacactactgggatgttcttgtacaagcttttgtccaaaatggcacagtgagcacaaatgagttcctgtgtgataaagacaaaacttcaacagtggcacccaccatacacaccactgtgccatctcctactacaacacctactccaaaggaaaaaccagaagctggaacctattcagttaataatggcaatgatacttgtctgctggctaccatggggctgcagctgaacatcactcaggataaggttgcttcagttattaacatcaaccccaatacaactcactccacaggcagctgccgttctcacactgctctacttagactcaatagcagcaccattaagtatctagactttgtctttgctgtgaaaaatgaaaaccgattttatctgaaggaagtgaacatcagcatgtatttggttaatggctccgttttcagcattgcaaataacaatctcagctactgggatgcccccctgggaagttcttatatgtgcaacaaagagcagactgtttcagtgtctggagcatttcagataaatacctttgatctaagggttcagcctttcaatgtgacacaaggaaagtattctacagcccaagagtgttcgctggatgatgacaccattctaatcccaattatagttggtgctggtctttcaggcttgattatcgttatagtgattgctcttttaatgataattcatgacagaagggagtttgctaaatttgaaaaggagaaaatgaatgccaaatgggacacgggtgaaaatcctatttataagagtgccgtaacaactgtggtcaatccgaagtatgagggaaaa

SEQ ID NO: 124 - protein, 413 aa, Artificial Sequence
  Synthetic Construct
LELNLTDSENATCLYAKWQMNFTVRYETTNKTYKTVTISDHGTVTYNGSICGDDQNGPKIAVQFGPGFSWIANFTKAASTYSIDSVSFSYNTGDNTTFPDAEDKGILTVDELLAIRIPLNDLFRCNSLSTLEKNDVVQHYWDVLVQAFVQNGTVSTNEFLCDKDKTSTVAPTIHTTVPSPTTTPTPKEKPEAGTYSVNNGNDTCLLATMGLQLNITQDKVASVININPNTTHSTGSCRSHTALLRLNSSTIKYLDFVFAVKNENRFYLKEVNISMYLVNGSVFSIANNNLSYWDAPLGSSYMCNKEQTVSVSGAFQINTFDLRVQPFNVTQGKYSTAQECSLDDDTILIPIIVGAGLSGLIIVIVIALLMIIHDRREFAKFEKEKMNAKWDTGENPIYKSAVTTVVNPKYEGK

SEQ ID NO: 125 - DNA, 1404 bp, Artificial Sequence
  Sequence from vector
  CDS (1)..(1404)
ttggaacttaatttgacagattcagaaaatgccacttgcctttatgcaaaatggcagatgaatttcacagtacgctatgaaactacaaataaaacttataaaactgtaaccatttcagaccatggcactgtgacatataatggaagcatttgtggggatgatcagaatggtcccaaaatagcagtgcagttcggacctggcttttcctggattgcgaattttaccaaggcagcatctacttattcaattgacagcgtctcattttcctacaacactggtgataacacaacatttcctgatgctgaagataaaggaattcttactgttgatgaacttttggccatcagaattccattgaatgacctttttagatgcaatagtttatcaactttggaaaagaatgatgttgtccaacactactgggatgttcttgtacaagcttttgtccaaaatggcacagtgagcacaaatgagttcctgtgtgataaagacaaaacttcaacagtggcacccaccatacacaccactgtgccatctcctactacaacacctactccaaaggaaaaaccagaagctggaacctattcagttaataatggcaatgatacttgtctgctggctaccatggggctgcagctgaacatcactcaggataaggttgcttcagttattaacatcaaccccaatacaactcactccacaggcagctgccgttctcacactgctctacttagactcaatagcagcaccattaagtatctagactttgtctttgctgtgaaaaatgaaaaccgattttatctgaaggaagtgaacatcagcatgtatttggttaatggctccgttttcagcattgcaaataacaatctcagctactgggatgcccccctgggaagttcttatatgtgcaacaaagagcagactgtttcagtgtctggagcatttcagataaatacctttgatctaagggttcagcctttcaatgtgacacaaggaaagtattctacagcccaagagtgttcgctggatgatgacaccattctaatcccaattatagttggtgctggtctttcaggcttgattatcgttatagtgattgctcggatccgggccgcacatcggcggaccatgcgggatcaggacaccgggaaggagaacgagatggactgggacgactctgccctgaccatcaccgtcaaccccatggagacctatgaggaccagcacagcagtgaggaggaggaggaagaggaagaggaagaggaaagcgaggacggcgaagaagaggatgacatcaccagcgccgagtcggagagcagcgaggaggaggagggggagcagggcgacccccagaacgcaacccggcagcagcagctggagtgggatgactccaccctcagctac

SEQ ID NO: 126 - protein, 468 aa, Artificial Sequence
  Synthetic Construct
LELNLTDSENATCLYAKWQMNFTVRYETTNKTYKTVTISDHGTVTYNGSICGDDQNGPKIAVQFGPGFSWIANFTKAASTYSIDSVSFSYNTGDNTTFPDAEDKGILTVDELLAIRIPLNDLFRCNSLSTLEKNDVVQHYWDVLVQAFVQNGTVSTNEFLCDKDKTSTVAPTIHTTVPSPTTTPTPKEKPEAGTYSVNNGNDTCLLATMGLQLNITQDKVASVININPNTTHSTGSCRSHTALLRLNSSTIKYLDFVFAVKNENRFYLKEVNISMYLVNGSVFSIANNNLSYWDAPLGSSYMCNKEQTVSVSGAFQINTFDLRVQPFNVTQGKYSTAQECSLDDDTILIPIIVGAGLSGLIIVIVIARIRAAHRRTMRDQDTGKENEMDWDDSALTITVNPMETYEDQHSSEEEEEEEEEEESEDGEEEDDITSAESESSEEEEGEQGDPQNATRQQQLEWDDSTLSY

SEQ ID NO: 127 - DNA, 1758 bp, Artificial Sequence
  Sequence from vector
  CDS (1)..(1758)
cgggaggtgctggtccccgaggggcccttgtaccgcgtggctggcacagctgtctccatctcctgcaatgtgaccggctatgagggccctgcccagcagaacttcgagtggttcctgtataggcccgaggccccagatactgcactgggcattgtcagtaccaaggatacccagttctcctatgctgtcttcaagtcccgagtggtggcgggtgaggtgcaggtgcagcgcctacaaggtgatgccgtggtgctcaagattgcccgcctgcaggcccaggatgccggcatttatgagtgccacaccccctccactgatacccgctacctgggcagctacagcggcaaggtggagctgagagttcttccagatgtcctccaggtgtctgctgcccccccagggccccgaggccgccaggccccaacctcacccccacgcatgacggtgcatgaggggcaggagctggcactgggctgcctggcgaggacaagcacacagaagcacacacacctggcagtgtcctttgggcgatctgtgcccgaggcaccagttgggcggtcaactctgcaggaagtggtgggaatccggtcagacttggccgtggaggctggagctccctatgctgagcgattggctgcaggggagcttcgtctgggcaaggaagggaccgatcggtaccgcatggtagtagggggtgcccaggcaggggacgcaggcacctaccactgcactgccgctgagtggattcaggatcctgatggcagctgggcccagattgcagagaaaagggccgtcctggcccacgtggatgtgcagacgctgtccagccagctggcagtgacagtggggcctggtgaacgtcggatcggcccaggggagcccttggaactgctgtgcaatgtgtcaggggcacttcccccagcaggccgtcatgctgcatactctgtaggttgggagatggcacctgcgggggcacctgggcccggccgcctggtagcccagctggacacagagggtgtgggcagcctgggccctggctatgagggccgacacattgccatggagaaggtggcatccagaacataccggctacggctagaggctgccaggcctggtgatgcgggcacctaccgctgcctcgccaaagcctatgttcgagggtctgggacccggcttcgtgaagcagccagtgcccgttcccggcctctccctgtacatgtgcgggaggaaggtgtggtgctggaggctgtggcatggctagcaggaggcacagtgtaccgcggggagactgcctccctgctgtgcaacatctctgtgcggggtggccccccaggactgcggctggccgccagctggtgggtggagcgaccagaggacggagagctcagctctgtccctgcccagctggtgggtggcgtaggccaggatggtgtggcagagctgggagtccggcctggaggaggccctgtcagcgtagagctggtggggccccgaagccatcggctgagactacacagcttggggcccgaggatgaaggcgtgtaccactgtgcccccagcgcctgggtgcagcatgccgactacagctggtaccaggcgggcagtgcccgctcagggcctgttacagtctacccctacatgcatgccctggacaccctatttgtgcctctgctggtgggtacaggggtggccctagtcactggtgccactgtccttggtaccatcacttgctgcttcatgaagaggcttcgaaaacgg

SEQ ID NO: 128 - protein, 586 aa, Artificial Sequence
  Synthetic Construct
REVLVPEGPLYRVAGTAVSISCNVTGYEGPAQQNFEWFLYRPEAPDTALGIVSTKDTQFSYAVFKSRVVAGEVQVQRLQGDAVVLKIARLQAQDAGIYECHTPSTDTRYLGSYSGKVELRVLPDVLQVSAAPPGPRGRQAPTSPPRMTVHEGQELALGCLARTSTQKHTHLAVSFGRSVPEAPVGRSTLQEVVGIRSDLAVEAGAPYAERLAAGELRLGKEGTDRYRMVVGGAQAGDAGTYHCTAAEWIQDPDGSWAQIAEKRAVLAHVDVQTLSSQLAVTVGPGERRIGPGEPLELLCNVSGALPPAGRHAAYSVGWEMAPAGAPGPGRLVAQLDTEGVGSLGPGYEGRHIAMEKVASRTYRLRLEAARPGDAGTYRCLAKAYVRGSGTRLREAASARSRPLPVHVREEGVVLEAVAWLAGGTVYRGETASLLCNISVRGGPPGLRLAASWWVERPEDGELSSVPAQLVGGVGQDGVAELGVRPGGGPVSVELVGPRSHRLRLHSLGPEDEGVYHCAPSAWVQHADYSWYQAGSARSGPVTVYPYMHALDTLFVPLLVGTGVALVTGATVLGTITCCFMKRLRKR

SEQ ID NO: 129 - DNA, 1038 bp, Artificial Sequence
  VLM domain
  CDS (1)..(1038)
ctggagctgaacctgaccgacagcgagaacgccacctgcctgtacgccaagtggcagatgaacttcaccgtgagatacgagaccaccaacaagacctacaagaccgtgaccatcagcgaccacggcaccgtgacctacaacggcagcatctgcggcgacgaccagaacggccccaagatcgccgtgcagttcggccccggcttcagctggatcgccaacttcaccaaggccgccagcacctacagcatcgacagcgtgagcttcagctacaacaccggcgacaacaccaccttccccgacgccgaggacaagggcatcctgaccgtggacgagctgctggccatcagaatccccctgaacgacctgttcagatgcaacagcctgagcaccctggagaagaacgacgtggtgcagcactactgggacgtgctggtgcaggccttcgtgcagaacggcaccgtgagcaccaacgagttcctgtgcgacaaggacaagaccagcaccgtggcccccaccatccacaccaccgtgcccagccccaccaccacccccacccccaaggagaagcccgaggccggcacctacagcgtgaacaacggcaacgacacctgcctgctggccaccatgggcctgcagctgaacatcacccaggacaaggtggccagcgtgatcaacatcaaccccaacaccacccacagcaccggcagctgcagaagccacaccgccctgctgagactgaacagcagcaccatcaagtacctggacttcgtgttcgccgtgaagaacgagaacagattctacctgaaggaggtgaacatcagcatgtacctggtgaacggcagcgtgttcagcatcgccaacaacaacctgagctactgggacgcccccctgggcagcagctacatgtgcaacaaggagcagaccgtgagcgtgagcggcgccttccagatcaacaccttcgacctgagagtgcagcccttcaacgtgacccagggcaagtacagcaccgcccaggagtgcagcctggacgacgacacc

SEQ ID NO: 130 - protein, 346 aa, Artificial Sequence
  Synthetic Construct
LELNLTDSENATCLYAKWQMNFTVRYETTNKTYKTVTISDHGTVTYNGSICGDDQNGPKIAVQFGPGFSWIANFTKAASTYSIDSVSFSYNTGDNTTFPDAEDKGILTVDELLAIRIPLNDLFRCNSLSTLEKNDVVQHYWDVLVQAFVQNGTVSTNEFLCDKDKTSTVAPTIHTTVPSPTTTPTPKEKPEAGTYSVNNGNDTCLLATMGLQLNITQDKVASVININPNTTHSTGSCRSHTALLRLNSSTIKYLDFVFAVKNENRFYLKEVNISMYLVNGSVFSIANNNLSYWDAPLGSSYMCNKEQTVSVSGAFQINTFDLRVQPFNVTQGKYSTAQECSLDDDT

SEQ ID NO: 131 - DNA, 63 bp, Artificial Sequence
  VLM domain
  CDS (1)..(63)
atcctgatccccatcatcgtgggcgccggcctgagcggcctgatcatcgtgatcgtgatcgcc

SEQ ID NO: 132 - protein, 21 aa, Artificial Sequence
  Synthetic Construct
ILIPIIVGAGLSGLIIVIVIA

SEQ ID NO: 133 - DNA, 45 bp, Artificial Sequence
  VLM domain
  CDS (1)..(45)
tacgtgatcggcagaagaaagagctacgccggctaccagaccctg

SEQ ID NO: 134 - protein, 15 aa, Artificial Sequence
  Synthetic Construct
YVIGRRKSYAGYQTL

SEQ ID NO: 135 - DNA, 2493 bp, Artificial Sequence
  VLM domain
  CDS (1)..(2493)
gccagagtgaacaagcacaagccctggctggagcccacctaccacggcatcgtgaccgagaacgacaacaccgtgctgctggacccccccctgatcgccctggacaaggacgcccccctgagattcgccgagagcttcgaggtgaccgtgaccaaggagggcgagatctgcggcttcaagatccacggccagaacgtgcccttcgacgccgtggtggtggacaagagcaccggcgagggcgtgatcagaagcaaggagaagctggactgcgagctgcagaaggactacagcttcaccatccaggcctacgactgcggcaagggccccgacggcaccaacgtgaagaagagccacaaggccaccgtgcacatccaggtgaacgacgtgaacgagtacgcccccgtgttcaaggagaagagctacaaggccaccgtgatcgagggcaagcagtacgacagcatcctgagagtggaggccgtggacgccgactgcagcccccagttcagccagatctgcagctacgagatcatcacccccgacgtgcccttcaccgtggacaaggacggctacatcaagaacaccgagaagctgaactacggcaaggagcaccagtacaagctgaccgtgaccgcctacgactgcggcaagaagagagccaccgaggacgtgctggtgaagatcagcatcaagcccacctgcacccccggctggcagggctggaacaacagaatcgagtacgagcccggcaccggcgccctggccgtgttccccaacatccacctggagacctgcgacgagcccgtggccagcgtgcaggccaccgtggagctggagaccagccacatcggcaagggctgcgacagagacacctacagcgagaagagcctgcacagactgtgcggcgccgccgccggcaccgccgagctgctgcccagccccagcggcagcctgaactggaccatgggcctgcccaccgacaacggccacgacagcgaccaggtgttcgagttcaacggcacccaggccgtgagaatccccgacggcgtggtgagcgtgagccccaaggagcccttcaccatcagcgtgtggatgagacacggccccttcggcagaaagaaggagaccatcctgtgcagcagcgacaagaccgacatgaacagacaccactacagcctgtacgtgcacggctgcagactgatcttcctgttcagacaggaccccagcgaggagaagaagtacagacccgccgagttccactggaagctgaaccaggtgtgcgacgaggagtggcaccactacgtgctgaacgtggagttccccagcgtgaccctgtacgtggacggcaccagccacgagcccttcagcgtgaccgaggactaccccctgcaccccagcaagatcgagacccagctggtggtgggcgcctgctggcaggagttcagcggcgtggagaacgacaacgagaccgagcccgtgaccgtggccagcgccggcggcgacctgcacatgacccagttcttcagaggcaacctggccggcctgaccctgagaagcggcaagctggccgacaagaaggtgatcgactgcctgtacacctgcaaggagggcctggacctgcaggtgctggaggacagcggcagaggcgtgcagatccaggcccaccccagccagctggtgctgaccctggagggcgaggacctgggcgagctggacaaggccatgcagcacatcagctacctgaacagcagacagttccccacccccggcatcagaagactgaagatcaccagcaccatcaagtgcttcaacgaggccacctgcatcagcgtgccccccgtggacggctacgtgatggtgctgcagcccgaggagcccaagatcagcctgagcggcgtgcaccacttcgccagagccgccagcgagttcgagagcagcgagggcgtgttcctgttccccgagctgagaatcatcagcaccatcaccagagaggtggagcccgagggcgacggcgccgaggaccccaccgtgcaggagagcctggtgagcgaggagatcgtgcacgacctggacacctgcgaggtgaccgtggagggcgaggagctgaaccacgagcaggagagcctggaggtggacatggccagactgcagcagaagggcatcgaggtgagcagcagcgagctgggcatgaccttcaccggcgtggacaccatggccagctacgaggaggtgctgcacctgctgagatacagaaactggcacgccagaagcctgctggacagaaagttcaagctgatctgcagcgagctgaacggcagatacatcagcaacgagttcaaggtggaggtgaacgtgatccacaccgccaaccccatggagcacgccgccgccgccgccgcccagccccagttcgtgcaccccgagcacagaagcttcgtggacctgagcggccacaacctggccaacccccaccccttcgccgtggtgcccagcacc

SEQ ID NO: 136 - protein, 831 aa, Artificial Sequence
  Synthetic Construct
ARVNKHKPWLEPTYHGIVTENDNTVLLDPPLIALDKDAPLRFAESFEVTVTKEGEICGFKIHGQNVPFDAVVVDKSTGEGVIRSKEKLDCELQKDYSFTIQAYDCGKGPDGTNVKKSHKATVHIQVNDVNEYAPVFKEKSYKATVIEGKQYDSILRVEAVDADCSPQFSQICSYEIITPDVPFTVDKDGYIKNTEKLNYGKEHQYKLTVTAYDCGKKRATEDVLVKISIKPTCTPGWQGWNNRIEYEPGTGALAVFPNIHLETCDEPVASVQATVELETSHIGKGCDRDTYSEKSLHRLCGAAAGTAELLPSPSGSLNWTMGLPTDNGHDSDQVFEFNGTQAVRIPDGVVSVSPKEPFTISVWMRHGPFGRKKETILCSSDKTDMNRHHYSLYVHGCRLIFLFRQDPSEEKKYRPAEFHWKLNQVCDEEWHHYVLNVEFPSVTLYVDGTSHEPFSVTEDYPLHPSKIETQLVVGACWQEFSGVENDNETEPVTVASAGGDLHMTQFFRGNLAGLTLRSGKLADKKVIDCLYTCKEGLDLQVLEDSGRGVQIQAHPSQLVLTLEGEDLGELDKAMQHISYLNSRQFPTPGIRRLKITSTIKCFNEATCISVPPVDGYVMVLQPEEPKISLSGVHHFARAASEFESSEGVFLFPELRIISTITREVEPEGDGAEDPTVQESLVSEEIVHDLDTCEVTVEGEELNHEQESLEVDMARLQQKGIEVSSSELGMTFTGVDTMASYEEVLHLLRYRNWHARSLLDRKFKLICSELNGRYISNEFKVEVNVIHTANPMEHAAAAAAQPQFVHPEHRSFVDLSGHNLANPHPFAVVPST

SEQ ID NO: 137 - DNA, 63 bp, Artificial Sequence
  VLM domain
  CDS (1)..(63)
gccaccgtggtgatcgtggtgtgcgtgagcttcctggtgttcatgatcatcctgggcgtgttc

SEQ ID NO: 138 - protein, 21 aa, Artificial Sequence
  Synthetic Construct
ATVVIVVCVSFLVFMIILGVF

SEQ ID NO: 139 - DNA, 303 bp, Artificial Sequence
  VLM domain
  CDS (1)..(303)
agaatcagagccgcccacagaagaaccatgagagaccaggacaccggcaaggagaacgagatggactgggacgacagcgccctgaccatcaccgtgaaccccatggagacctacgaggaccagcacagcagcgaggaggaggaggaggaggaggaggaggaggagagcgaggacggcgaggaggaggacgacatcaccagcgccgagagcgagagcagcgaggaggaggagggcgagcagggcgacccccagaacgccaccagacagcagcagctggagtgggacgacagcaccctgagctac

SEQ ID NO: 140 - protein, 101 aa, Artificial Sequence
  Synthetic Construct
RIRAAHRRTMRDQDTGKENEMDWDDSALTITVNPMETYEDQHSSEEEEEEEEEEESEDGEEEDDITSAESESSEEEEGEQGDPQNATRQQQLEWDDSTLSY

SEQ ID NO: 141 - DNA, 78 bp, Artificial Sequence
  VLM domain
  CDS (1)..(78)
agcagccactggtgctgcaagaaggaggtgcaggagaccagaagagagagaagaagactgatgagcatggagatggac

SEQ ID NO: 142 - protein, 26 aa, Artificial Sequence
  Synthetic Construct
SSHWCCKKEVQETRRERRRLMSMEMD

SEQ ID NO: 143 - DNA, 111 bp, Artificial Sequence
  VLM domain
  CDS (1)..(111)
aagtgcggcttcttcaagagagccagaaccagagccctgtacgaggccaagagacagaaggccgagatgaagagccagcccagcgagaccgagagactgaccgacgactac

SEQ ID NO: 144 - protein, 37 aa, Artificial Sequence
  Synthetic Construct
KCGFFKRARTRALYEAKRQKAEMKSQPSETERLTDDY

SEQ ID NO: 145 - DNA, 147 bp, Artificial Sequence
  VLM domain
  CDS (1)..(147)
gtgatgcagagactgttccccagaatcccccacatgaaggaccccatcggcgacagcttccagaacgacaagctggtggtgtgggaggccggcaaggccggcctggaggagtgcctggtgaccgaggtgcaggtggtgcagaagacc

SEQ ID NO: 146 - protein, 49 aa, Artificial Sequence
  Synthetic Construct
VMQRLFPRIPHMKDPIGDSFQNDKLVVWEAGKAGLEECLVTEVQVVQKT

SEQ ID NO: 147 - DNA, 207 bp, Artificial Sequence
  VLM domain
  CDS (1)..(207)
agactgagcagaaagggccacatgtaccccgtgagaaactacagccccaccgagatggtgtgcatcagcagcctgctgcccgacggcggcgagggccccagcgccaccgccaacggcggcctgagcaaggccaagagccccggcctgacccccgagcccagagaggacagagagggcgacgacctgaccctgcacagcttcctgccc

SEQ ID NO: 148 - protein, 69 aa, Artificial Sequence
  Synthetic Construct
RLSRKGHMYPVRNYSPTEMVCISSLLPDGGEGPSATANGGLSKAKSPGLTPEPREDREGDDLTLHSFLP

SEQ ID NO: 149 - DNA, 138 bp, Artificial Sequence
  VLM domain
  CDS (1)..(138)
ctgctgatgatcatccacgacagaagagagttcgccaagttcgagaaggagaagatgaacgccaagtgggacaccggcgagaaccccatctacaagagcgccgtgaccaccgtggtgaaccccaagtacgagggcaag

SEQ ID NO: 150 - protein, 46 aa, Artificial Sequence
  Synthetic Construct
LLMIIHDRREFAKFEKEKMNAKWDTGENPIYKSAVTTVVNPKYEGK

SEQ ID NO: 151 - DNA, 741 bp, Artificial Sequence
  GC33 scFv
  CDS (1)..(741)
caagtgcagctcgtccaatccggggccgaggtcaagaaaccaggtgcatccgtcaaggtgtcttgcaaggccagcgggtatacgttcactgattacgaaatgcattgggtccgtcaggcccccgggcaaggccttgagtggatgggcgctcttgatcctaaaacaggggatactgcttacagccagaaattcaaaggaagagtgacacttacagcagacaaaagtacttccaccgcatacatggaactgagttcactcacatccgaagacactgctgtatactactgtacaagattttattcttatacctattggggccaggggactctcgtcacagtgtctagctcctcaggtggaagctccagatcttctagctccggtggtggcggctccggcggggggggcgatgtagtaatgactcaatcccctctgtcattgcctgtcacccctggcgagccagccagcatctcttgcagatcttctcaaagcctcgtgcattccaatggaaacacgtacctgcattggtacctgcagaaacctggacagtcaccacaactgctgatctataaggtgagcaaccggttcagtggagtgccggataggtttagcggatctggcagcggcacggacttcacactgaagataagccgtgtcgaagctgaggatgttggagtctattattgctcacagaacactcatgtgccaccaacctttgggcaaggaactaaacttgagattaag

SEQ ID NO: 152 - protein, 247 aa, Artificial Sequence
  Synthetic Construct
QVQLVQSGAEVKKPGASVKVSCKASGYTFTDYEMHWVRQAPGQGLEWMGALDPKTGDTAYSQKFKGRVTLTADKSTSTAYMELSSLTSEDTAVYYCTRFYSYTYWGQGTLVTVSSSSGGSSRSSSSGGGGSGGGGDVVMTQSPLSLPVTPGEPASISCRSSQSLVHSNGNTYLHWYLQKPGQSPQLLIYKVSNRFSGVPDRFSGSGSGTDFTLKISRVEAEDVGVYYCSQNTHVPPTFGQGTKLEIK

SEQ ID NO: 153 - DNA, 744 bp, Artificial Sequence
  6A6 scFv
  CDS (1)..(744)
caaatgcagctggttcaaagtggtgctgaggtcaaaaaaccaggcgcgagcgtaaaactgtcctgtaaagccagcggatacaccttctccagctactggatgcactgggtccgacaggccccagggcagaggctcgaatggatgggcgagatcaaccccggcaatggtcacaccaattacaatgaaaagttcaagagccgcgtgaccattactgtcgataaatctgcatctacagcatacatggaactttccagccttagatcagaggacacagccgtatattattgtgccaagatctggggaccgtcccttacaagtcctttcgattactggggtcaggggacgcttgtaacggtatccggggggggaggttccggcggaggcggttcaggagggggcggttccgggggcggtggatctaattttatgcttacgcaacccccgtctgtaagtgtttccccagggaaaaccgctcgaataacctgtcgaggagacaacctcggcgatgttaatgtccattggtatcaacagcgacctgggcaagccccggttttggtcatgtactatgatgcggaccgccccagtggcataccggaacggttcagtggaagtaactctggcaatactgcaacgctgaccatcagtggcgttgaggcgggtgacgaggcagattattactgtcaggtctgggaccggaccagtgagtatgttttcggaaccggcacaaaagtaactgtactcggg

SEQ ID NO: 154 - protein, 248 aa, Artificial Sequence
  Synthetic Construct
QMQLVQSGAEVKKPGASVKLSCKASGYTFSSYWMHWVRQAPGQRLEWMGEINPGNGHTNYNEKFKSRVTITVDKSASTAYMELSSLRSEDTAVYYCAKIWGPSLTSPFDYWGQGTLVTVSGGGGSGGGGSGGGGSGGGGSNFMLTQPPSVSVSPGKTARITCRGDNLGDVNVHWYQQRPGQAPVLVMYYDADRPSGIPERFSGSNSGNTATLTISGVEAGDEADYYCQVWDRTSEYVFGTGTKVTVLG

SEQ ID NO: 155 - DNA, 729 bp, Artificial Sequence
  ALAC scFv
  CDS (1)..(729)
gaagtgcagcttgtagaaagtgggggcggactggtacagccgggcgggagcctcagattgtcatgcgccgcttctggtttcactttttcttcctacggtatgtcctgggttagacaagctcctgggaagggtcttgagtgggtggctacaattactagtggtggttcatacacgtactatgttgacagtgttaaggggcgatttactataagtagagataatgccaagaacacactctaccttcagatgaatagcttgcgggcggaagatacagcagtttattattgcgttcggattggcgaggacgcactcgactattggggacaagggactcttgttacggtgtctagtggggggggaggttccggcggaggcggttcaggagggggcggttccgggggcggtggatctgacatccagatgacgcaatccccaagttcacttagcgcttcagtcggcgaccgcgttaccataacatgcagagcaagtcaagacattgcagggagtcttaattggttgcagaagccaggtaaagctataaagcgccttatatatgccaccagcagtctggattctggtgtaccgaagagattcagcggttccagaagtggcagtgactatactctgaccatttcttctctccagcctgaagatttcgccacttactattgtctgcaatatggttctttcccaccaacattcggacaaggtactaaggtcgagattaag

SEQ ID NO: 156 - protein, 243 aa, Artificial Sequence
  Synthetic Construct
EVQLVESGGGLVQPGGSLRLSCAASGFTFSSYGMSWVRQAPGKGLEWVATITSGGSYTYYVDSVKGRFTISRDNAKNTLYLQMNSLRAEDTAVYYCVRIGEDALDYWGQGTLVTVSSGGGGSGGGGSGGGGSGGGGSDIQMTQSPSSLSASVGDRVTITCRASQDIAGSLNWLQKPGKAIKRLIYATSSLDSGVPKRFSGSRSGSDYTLTISSLQPEDFATYYCLQYGSFPPTFGQGTKVEIK

SEQ ID NO: 157 - DNA, 27 bp, Artificial Sequence
  from random peptide library
  CDS (1)..(27)
tgcctggtgagcggcggcatggcctgc

SEQ ID NO: 158 - protein, 9 aa, Artificial Sequence
  Synthetic Construct
CLVSGGMAC

SEQ ID NO: 159 - DNA, 27 bp, Artificial Sequence
  from random peptide library
  CDS (1)..(27)
tgcctggtgagcggctgcaacacctgc

SEQ ID NO: 160 - protein, 9 aa, Artificial Sequence
  Synthetic Construct
CLVSGCNTC

SEQ ID NO: 161 - DNA, 27 bp, Artificial Sequence
  from random peptide library
  CDS (1)..(27)
tgcgacctggtgagcggctacggctgc

SEQ ID NO: 162 - protein, 9 aa, Artificial Sequence
  Synthetic Construct
CDLVSGYGC

SEQ ID NO: 163 - DNA, 27 bp, Artificial Sequence
  from random peptide library
  CDS (1)..(27)
tgcctggtgagcaccagcgccacctgc

SEQ ID NO: 164 - protein, 9 aa, Artificial Sequence
  Synthetic Construct
CLVSTSATC

SEQ ID NO: 165 - DNA, 27 bp, Artificial Sequence
  from random peptide library
  CDS (1)..(27)
tgcaccgccctggtgagccagacctgc

SEQ ID NO: 166 - protein, 9 aa, Artificial Sequence
  Synthetic Construct
CTALVSQTC

SEQ ID NO: 167 - DNA, 27 bp, Artificial Sequence
  from random peptide library
  CDS (1)..(27)
tgctggctggtgagcggcatcggctgc

SEQ ID NO: 168 - protein, 9 aa, Artificial Sequence
  Synthetic Construct
CWLVSGIGC

SEQ ID NO: 169 - DNA, 27 bp, Artificial Sequence
  from random peptide library
  CDS (1)..(27)
tgcctggtgagcagcgtgttcccctgc

SEQ ID NO: 170 - protein, 9 aa, Artificial Sequence
  Synthetic Construct
CLVSSVFPC

SEQ ID NO: 171 - DNA, 27 bp, Artificial Sequence
  from random peptide library
  CDS (1)..(27)
tgccccagcctggtgagcagcgtgtgc

SEQ ID NO: 172 - protein, 9 aa, Artificial Sequence
  Synthetic Construct
CPSLVSSVC

SEQ ID NO: 173 - DNA, 27 bp, Artificial Sequence
  from random peptide library
  CDS (1)..(27)
tgcggcgtgagcctggtgagcacctgc

SEQ ID NO: 174 - protein, 9 aa, Artificial Sequence
  Synthetic Construct
CGVSLVSTC

SEQ ID NO: 175 - DNA, 27 bp, Artificial Sequence
  from random peptide library
  CDS (1)..(27)
tgccagctggtgagcggcgagccctgc

SEQ ID NO: 176 - protein, 9 aa, Artificial Sequence
  Synthetic Construct
CQLVSGEPC

SEQ ID NO: 177 - DNA, 27 bp, Artificial Sequence
  from random peptide library
  CDS (1)..(27)
tgcaacctggtgagcagaagactgtgc

SEQ ID NO: 178 - protein, 9 aa, Artificial Sequence
  Synthetic Construct
CNLVSRRLC

SEQ ID NO: 179 - DNA, 27 bp, Artificial Sequence
  from random peptide library
  CDS (1)..(27)
tgcctggtgagctggagaggcagctgc

SEQ ID NO: 180 - protein, 9 aa, Artificial Sequence
  Synthetic Construct
CLVSWRGSC

SEQ ID NO: 181 - DNA, 27 bp, Artificial Sequence
  from random peptide library
  CDS (1)..(27)
tgcgaccacttcctggtgagcccctgc

SEQ ID NO: 182 - protein, 9 aa, Artificial Sequence
  Synthetic Construct
CDHFLVSPC

SEQ ID NO: 183 - DNA, 27 bp, Artificial Sequence
  from random peptide library
  CDS (1)..(27)
tgcggcagaggcctggtgagcctgtgc

SEQ ID NO: 184 - protein, 9 aa, Artificial Sequence
  Synthetic Construct
CGRGLVSLC

SEQ ID NO: 185 - DNA, 27 bp, Artificial Sequence
  from random peptide library
  CDS (1)..(27)
tgcttccccgtggccctggtgagctgc

SEQ ID NO: 186 - protein, 9 aa, Artificial Sequence
  Synthetic Construct
CFPVALVSC

SEQ ID NO: 187 - DNA, 27 bp, Artificial Sequence
  from random peptide library
  CDS (1)..(27)
tgcagatggagcagcctggtgagctgc

SEQ ID NO: 188 - protein, 9 aa, Artificial Sequence
  Synthetic Construct
CRWSSLVSC

SEQ ID NO: 189 - DNA, 27 bp, Artificial Sequence
  from random peptide library
  CDS (1)..(27)
tgctggagcaagagcctggtgagctgc

SEQ ID NO: 190 - protein, 9 aa, Artificial Sequence
  Synthetic Construct
CWSKSLVSC

SEQ ID NO: 191 - DNA, 27 bp, Artificial Sequence
  from random peptide library
  CDS (1)..(27)
tgccccggcagaagcctggtgagctgc

SEQ ID NO: 192 - protein, 9 aa, Artificial Sequence
  Synthetic Construct
CPGRSLVSC

SEQ ID NO: 193 - DNA, 36 bp, Artificial Sequence
  from random peptide library
  CDS (1)..(36)
acccacagaccccccatgtggagccccgtgtggccc

SEQ ID NO: 194 - protein, 12 aa, Artificial Sequence
  Synthetic Construct
THRPPMWSPVWP

SEQ ID NO: 195 - DNA, 36 bp, Artificial Sequence
  PEPN
  CDS (1)..(36)
acccacgtgagccccaaccagggcggcctgcccagc

SEQ ID NO: 196 - protein, 12 aa, Artificial Sequence
  Synthetic Construct
THVSPNQGGLPS

SEQ ID NO: 197 - DNA, 2190 bp, Artificial Sequence
  Isopeptide(1) domain-IGSF8 scaffold
  CDS (1)..(2190)
gactacaaagaccacgacggggattataaagatcatgacatcgattacaaggatgacgatgataagggctctggcgacagcgcaacacacatcaagttctcaaaacgggatgaggatggaaaagaactggccggagcgacaatggaactgagagattcttccggcaagactatctccacatggattagtgacgggcaagtcaaagacttctacttgtaccccggtaagtacaccttcgttgagactgccgctcctgacgggtatgaagtcgccacggcgatcacattcactgtgaatgaacagggacaggtgacggtcaatggaggatcccccgccaacctgaaggccctggaggcccagaagcagaaggagcagagacaggccgccgaggagctggccaacgccaagaagctgaaggagcagctggagaagcgggaggtgctggtccccgaggggcccttgtaccgcgtggctggcacagctgtctccatctcctgcaatgtgaccggctatgagggccctgcccagcagaacttcgagtggttcctgtataggcccgaggccccagatactgcactgggcattgtcagtaccaaggatacccagttctcctatgctgtcttcaagtcccgagtggtggcgggtgaggtgcaggtgcagcgcctacaaggtgatgccgtggtgctcaagattgcccgcctgcaggcccaggatgccggcatttatgagtgccacaccccctccactgatacccgctacctgggcagctacagcggcaaggtggagctgagagttcttccagatgtcctccaggtgtctgctgcccccccagggccccgaggccgccaggccccaacctcacccccacgcatgacggtgcatgaggggcaggagctggcactgggctgcctggcgaggacaagcacacagaagcacacacacctggcagtgtcctttgggcgatctgtgcccgaggcaccagttgggcggtcaactctgcaggaagtggtgggaatccggtcagacttggccgtggaggctggagctccctatgctgagcgattggctgcaggggagcttcgtctgggcaaggaagggaccgatcggtaccgcatggtagtagggggtgcccaggcaggggacgcaggcacctaccactgcactgccgctgagtggattcaggatcctgatggcagctgggcccagattgcagagaaaagggccgtcctggcccacgtggatgtgcagacgctgtccagccagctggcagtgacagtggggcctggtgaacgtcggatcggcccaggggagcccttggaactgctgtgcaatgtgtcaggggcacttcccccagcaggccgtcatgctgcatactctgtaggttgggagatggcacctgcgggggcacctgggcccggccgcctggtagcccagctggacacagagggtgtgggcagcctgggccctggctatgagggccgacacattgccatggagaaggtggcatccagaacataccggctacggctagaggctgccaggcctggtgatgcgggcacctaccgctgcctcgccaaagcctatgttcgagggtctgggacccggcttcgtgaagcagccagtgcccgttcccggcctctccctgtacatgtgcgggaggaaggtgtggtgctggaggctgtggcatggctagcaggaggcacagtgtaccgcggggagactgcctccctgctgtgcaacatctctgtgcggggtggccccccaggactgcggctggccgccagctggtgggtggagcgaccagaggacggagagctcagctctgtccctgcccagctggtgggtggcgtaggccaggatggtgtggcagagctgggagtccggcctggaggaggccctgtcagcgtagagctggtggggccccgaagccatcggctgagactacacagcttggggcccgaggatgaaggcgtgtaccactgtgcccccagcgcctgggtgcagcatgccgactacagctggtaccaggcgggcagtgcccgctcagggcctgttacagtctacccctacatgcatgccctggacaccctatttgtgcctctgctggtgggtacaggggtggccctagtcactggtgccactgtccttggtaccatcacttgctgcttcatgaagaggcttcgaaaacgg

SEQ ID NO: 198 - protein, 730 aa, Artificial Sequence
  Synthetic Construct
DYKDHDGDYKDHDIDYKDDDDKGSGDSATHIKFSKRDEDGKELAGATMELRDSSGKTISTWISDGQVKDFYLYPGKYTFVETAAPDGYEVATAITFTVNEQGQVTVNGGSPANLKALEAQKQKEQRQAAEELANAKKLKEQLEKREVLVPEGPLYRVAGTAVSISCNVTGYEGPAQQNFEWFLYRPEAPDTALGIVSTKDTQFSYAVFKSRVVAGEVQVQRLQGDAVVLKIARLQAQDAGIYECHTPSTDTRYLGSYSGKVELRVLPDVLQVSAAPPGPRGRQAPTSPPRMTVHEGQELALGCLARTSTQKHTHLAVSFGRSVPEAPVGRSTLQEVVGIRSDLAVEAGAPYAERLAAGELRLGKEGTDRYRMVVGGAQAGDAGTYHCTAAEWIQDPDGSWAQIAEKRAVLAHVDVQTLSSQLAVTVGPGERRIGPGEPLELLCNVSGALPPAGRHAAYSVGWEMAPAGAPGPGRLVAQLDTEGVGSLGPGYEGRHIAMEKVASRTYRLRLEAARPGDAGTYRCLAKAYVRGSGTRLREAASARSRPLPVHVREEGVVLEAVAWLAGGTVYRGETASLLCNISVRGGPPGLRLAASWWVERPEDGELSSVPAQLVGGVGQDGVAELGVRPGGGPVSVELVGPRSHRLRLHSLGPEDEGVYHCAPSAWVQHADYSWYQAGSARSGPVTVYPYMHALDTLFVPLLVGTGVALVTGATVLGTITCCFMKRLRKR

SEQ ID NO: 199 - DNA, 2289 bp, Artificial Sequence
  Isopeptide(2) domain-IGSF8 scaffold
  CDS (1)..(2289)
gactacaaagaccacgacggggattataaagatcatgacatcgattacaaggatgacgatgataagggctctggcggatcccatatgaagccgctgcgtggtgccgtgtttagcctgcagaaacagcatcccgactatcccgatatctatggcgcgattgatcagaatgggacctatcaaaatgtgcgtaccggcgaagatggtaaactgacctttaagaatctgagcgatggcaaatatcgcctgtttgaaaatagcgaacccgctggctataaaccggtgcagaataagccgattgtggcgtttcagattgtgaatggcgaagtgcgtgatgtgaccagcattgtgccgcaggatattccggctacatatgaatttaccaacggtaaacattatatcaccaatgaaccgataccgccgaaaggatcccccgccaacctgaaggccctggaggcccagaagcagaaggagcagagacaggccgccgaggagctggccaacgccaagaagctgaaggagcagctggagaagcgggaggtgctggtccccgaggggcccttgtaccgcgtggctggcacagctgtctccatctcctgcaatgtgaccggctatgagggccctgcccagcagaacttcgagtggttcctgtataggcccgaggccccagatactgcactgggcattgtcagtaccaaggatacccagttctcctatgctgtcttcaagtcccgagtggtggcgggtgaggtgcaggtgcagcgcctacaaggtgatgccgtggtgctcaagattgcccgcctgcaggcccaggatgccggcatttatgagtgccacaccccctccactgatacccgctacctgggcagctacagcggcaaggtggagctgagagttcttccagatgtcctccaggtgtctgctgcccccccagggccccgaggccgccaggccccaacctcacccccacgcatgacggtgcatgaggggcaggagctggcactgggctgcctggcgaggacaagcacacagaagcacacacacctggcagtgtcctttgggcgatctgtgcccgaggcaccagttgggcggtcaactctgcaggaagtggtgggaatccggtcagacttggccgtggaggctggagctccctatgctgagcgattggctgcaggggagcttcgtctgggcaaggaagggaccgatcggtaccgcatggtagtagggggtgcccaggcaggggacgcaggcacctaccactgcactgccgctgagtggattcaggatcctgatggcagctgggcccagattgcagagaaaagggccgtcctggcccacgtggatgtgcagacgctgtccagccagctggcagtgacagtggggcctggtgaacgtcggatcggcccaggggagcccttggaactgctgtgcaatgtgtcaggggcacttcccccagcaggccgtcatgctgcatactctgtaggttgggagatggcacctgcgggggcacctgggcccggccgcctggtagcccagctggacacagagggtgtgggcagcctgggccctggctatgagggccgacacattgccatggagaaggtggcatccagaacataccggctacggctagaggctgccaggcctggtgatgcgggcacctaccgctgcctcgccaaagcctatgttcgagggtctgggacccggcttcgtgaagcagccagtgcccgttcccggcctctccctgtacatgtgcgggaggaaggtgtggtgctggaggctgtggcatggctagcaggaggcacagtgtaccgcggggagactgcctccctgctgtgcaacatctctgtgcggggtggccccccaggactgcggctggccgccagctggtgggtggagcgaccagaggacggagagctcagctctgtccctgcccagctggtgggtggcgtaggccaggatggtgtggcagagctgggagtccggcctggaggaggccctgtcagcgtagagctggtggggccccgaagccatcggctgagactacacagcttggggcccgaggatgaaggcgtgtaccactgtgcccccagcgcctgggtgcagcatgccgactacagctggtaccaggcgggcagtgcccgctcagggcctgttacagtctacccctacatgcatgccctggacaccctatttgtgcctctgctggtgggtacaggggtggccctagtcactggtgccactgtccttggtaccatcacttgctgcttcatgaagaggcttcgaaaacgg

SEQ ID NO: 200 - protein, 763 aa, Artificial Sequence
  Synthetic Construct
DYKDHDGDYKDHDIDYKDDDDKGSGGSHMKPLRGAVFSLQKQHPDYPDIYGAIDQNGTYQNVRTGEDGKLTFKNLSDGKYRLFENSEPAGYKPVQNKPIVAFQIVNGEVRDVTSIVPQDIPATYEFTNGKHYITNEPIPPKGSPANLKALEAQKQKEQRQAAEELANAKKLKEQLEKREVLVPEGPLYRVAGTAVSISCNVTGYEGPAQQNFEWFLYRPEAPDTALGIVSTKDTQFSYAVFKSRVVAGEVQVQRLQGDAVVLKIARLQAQDAGIYECHTPSTDTRYLGSYSGKVELRVLPDVLQVSAAPPGPRGRQAPTSPPRMTVHEGQELALGCLARTSTQKHTHLAVSFGRSVPEAPVGRSTLQEVVGIRSDLAVEAGAPYAERLAAGELRLGKEGTDRYRMVVGGAQAGDAGTYHCTAAEWIQDPDGSWAQIAEKRAVLAHVDVQTLSSQLAVTVGPGERRIGPGEPLELLCNVSGALPPAGRHAAYSVGWEMAPAGAPGPGRLVAQLDTEGVGSLGPGYEGRHIAMEKVASRTYRLRLEAARPGDAGTYRCLAKAYVRGSGTRLREAASARSRPLPVHVREEGVVLEAVAWLAGGTVYRGETASLLCNISVRGGPPGLRLAASWWVERPEDGELSSVPAQLVGGVGQDGVAELGVRPGGGPVSVELVGPRSHRLRLHSLGPEDEGVYHCAPSAWVQHADYSWYQAGSARSGPVTVYPYMHALDTLFVPLLVGTGVALVTGATVLGTITCCFMKRLRKR

SEQ ID NO: 201 - DNA, 2568 bp, Artificial Sequence
  Isoeptide(1) + Isopeptide(2) domains-IGSF8 scaffold
  CDS (1)..(2568)
gactacaaagaccacgacggggattataaagatcatgacatcgattacaaggatgacgatgataagggctctggcgacagcgcaacacacatcaagttctcaaaacgggatgaggatggaaaagaactggccggagcgacaatggaactgagagattcttccggcaagactatctccacatggattagtgacgggcaagtcaaagacttctacttgtaccccggtaagtacaccttcgttgagactgccgctcctgacgggtatgaagtcgccacggcgatcacattcactgtgaatgaacagggacaggtgacggtcaatggaggcggtggcggctctggcggaggaggctcaggatcccatatgaagccgctgcgtggtgccgtgtttagcctgcagaaacagcatcccgactatcccgatatctatggcgcgattgatcagaatgggacctatcaaaatgtgcgtaccggcgaagatggtaaactgacctttaagaatctgagcgatggcaaatatcgcctgtttgaaaatagcgaacccgctggctataaaccggtgcagaataagccgattgtggcgtttcagattgtgaatggcgaagtgcgtgatgtgaccagcattgtgccgcaggatattccggctacatatgaatttaccaacggtaaacattatatcaccaatgaaccgataccgccgaaaggatcccccgccaacctgaaggccctggaggcccagaagcagaaggagcagagacaggccgccgaggagctggccaacgccaagaagctgaaggagcagctggagaagcgggaggtgctggtccccgaggggcccttgtaccgcgtggctggcacagctgtctccatctcctgcaatgtgaccggctatgagggccctgcccagcagaacttcgagtggttcctgtataggcccgaggccccagatactgcactgggcattgtcagtaccaaggatacccagttctcctatgctgtcttcaagtcccgagtggtggcgggtgaggtgcaggtgcagcgcctacaaggtgatgccgtggtgctcaagattgcccgcctgcaggcccaggatgccggcatttatgagtgccacaccccctccactgatacccgctacctgggcagctacagcggcaaggtggagctgagagttcttccagatgtcctccaggtgtctgctgcccccccagggccccgaggccgccaggccccaacctcacccccacgcatgacggtgcatgaggggcaggagctggcactgggctgcctggcgaggacaagcacacagaagcacacacacctggcagtgtcctttgggcgatctgtgcccgaggcaccagttgggcggtcaactctgcaggaagtggtgggaatccggtcagacttggccgtggaggctggagctccctatgctgagcgattggctgcaggggagcttcgtctgggcaaggaagggaccgatcggtaccgcatggtagtagggggtgcccaggcaggggacgcaggcacctaccactgcactgccgctgagtggattcaggatcctgatggcagctgggcccagattgcagagaaaagggccgtcctggcccacgtggatgtgcagacgctgtccagccagctggcagtgacagtggggcctggtgaacgtcggatcggcccaggggagcccttggaactgctgtgcaatgtgtcaggggcacttcccccagcaggccgtcatgctgcatactctgtaggttgggagatggcacctgcgggggcacctgggcccggccgcctggtagcccagctggacacagagggtgtgggcagcctgggccctggctatgagggccgacacattgccatggagaaggtggcatccagaacataccggctacggctagaggctgccaggcctggtgatgcgggcacctaccgctgcctcgccaaagcctatgttcgagggtctgggacccggcttcgtgaagcagccagtgcccgttcccggcctctccctgtacatgtgcgggaggaaggtgtggtgctggaggctgtggcatggctagcaggaggcacagtgtaccgcggggagactgcctccctgctgtgcaacatctctgtgcggggtggccccccaggactgcggctggccgccagctggtgggtggagcgaccagaggacggagagctcagctctgtccctgcccagctggtgggtggcgtaggccaggatggtgtggcagagctgggagtccggcctggaggaggccctgtcagcgtagagctggtggggccccgaagccatcggctgagactacacagcttggggcccgaggatgaaggcgtgtaccactgtgcccccagcgcctgggtgcagcatgccgactacagctggtaccaggcgggcagtgcccgctcagggcctgttacagtctacccctacatgcatgccctggacaccctatttgtgcctctgctggtgggtacaggggtggccctagtcactggtgccactgtccttggtaccatcacttgctgcttcatgaagaggcttcgaaaacgg

SEQ ID NO: 202 - protein, 856 aa, Artificial Sequence
  Synthetic Construct
DYKDHDGDYKDHDIDYKDDDDKGSGDSATHIKFSKRDEDGKELAGATMELRDSSGKTISTWISDGQVKDFYLYPGKYTFVETAAPDGYEVATAITFTVNEQGQVTVNGGGGGSGGGGSGSHMKPLRGAVFSLQKQHPDYPDIYGAIDQNGTYQNVRTGEDGKLTFKNLSDGKYRLFENSEPAGYKPVQNKPIVAFQIVNGEVRDVTSIVPQDIPATYEFTNGKHYITNEPIPPKGSPANLKALEAQKQKEQRQAAEELANAKKLKEQLEKREVLVPEGPLYRVAGTAVSISCNVTGYEGPAQQNFEWFLYRPEAPDTALGIVSTKDTQFSYAVFKSRVVAGEVQVQRLQGDAVVLKIARLQAQDAGIYECHTPSTDTRYLGSYSGKVELRVLPDVLQVSAAPPGPRGRQAPTSPPRMTVHEGQELALGCLARTSTQKHTHLAVSFGRSVPEAPVGRSTLQEVVGIRSDLAVEAGAPYAERLAAGELRLGKEGTDRYRMVVGGAQAGDAGTYHCTAAEWIQDPDGSWAQIAEKRAVLAHVDVQTLSSQLAVTVGPGERRIGPGEPLELLCNVSGALPPAGRHAAYSVGWEMAPAGAPGPGRLVAQLDTEGVGSLGPGYEGRHIAMEKVASRTYRLRLEAARPGDAGTYRCLAKAYVRGSGTRLREAASARSRPLPVHVREEGVVLEAVAWLAGGTVYRGETASLLCNISVRGGPPGLRLAASWWVERPEDGELSSVPAQLVGGVGQDGVAELGVRPGGGPVSVELVGPRSHRLRLHSLGPEDEGVYHCAPSAWVQHADYSWYQAGSARSGPVTVYPYMHALDTLFVPLLVGTGVALVTGATVLGTITCCFMKRLRKR

SEQ ID NO: 203 - DNA, 2985 bp, Artificial Sequence
  Isoeptide(3) + Isopeptide(1) + Isopeptide(2) domains-IGSF8 scaffold
  CDS (1)..(2985)
gactacaaagaccacgacggggattataaagatcatgacatcgattacaaggatgacgatgataagtcttctgggttggtccccagaggcagccacatggcttctatgaccgggggacaacaaatgggcagaggctcaagcggccttagcggtgaaactggacagagcggtaataccacgattgaggaggactccactacccatgtcaaattttctaaaagagacgcgaacggaaaggaattggctggcgcgatgattgaactgaggaacctctctggacagaccatacaaagctggatttcagacgggaccgttaaggttttctatctgatgcctggcacctaccagtttgttgaaactgcggcgccagaaggatatgagttggcggctcccatcacattcaccattgatgaaaagggtcaaatttgggtcgactcagccatggttgataccttatcaggtttatcaagtgagcaaggtcagtccggtgatgacagcgcaacacacatcaagttctcaaaacgggatgaggatggaaaagaactggccggagcgacaatggaactgagagattcttccggcaagactatctccacatggattagtgacgggcaagtcaaagacttctacttgtaccccggtaagtacaccttcgttgagactgccgctcctgacgggtatgaagtcgccacggcgatcacattcactgtgaatgaacagggacaggtgacggtcaatggaggcggtggcggctctggcggaggaggctcaggatcccatatgaagccgctgcgtggtgccgtgtttagcctgcagaaacagcatcccgactatcccgatatctatggcgcgattgatcagaatgggacctatcaaaatgtgcgtaccggcgaagatggtaaactgacctttaagaatctgagcgatggcaaatatcgcctgtttgaaaatagcgaacccgctggctataaaccggtgcagaataagccgattgtggcgtttcagattgtgaatggcgaagtgcgtgatgtgaccagcattgtgccgcaggatattccggctacatatgaatttaccaacggtaaacattatatcaccaatgaaccgataccgccgaaaggatcccccgccaacctgaaggccctggaggcccagaagcagaaggagcagagacaggccgccgaggagctggccaacgccaagaagctgaaggagcagctggagaagcgggaggtgctggtccccgaggggcccttgtaccgcgtggctggcacagctgtctccatctcctgcaatgtgaccggctatgagggccctgcccagcagaacttcgagtggttcctgtataggcccgaggccccagatactgcactgggcattgtcagtaccaaggatacccagttctcctatgctgtcttcaagtcccgagtggtggcgggtgaggtgcaggtgcagcgcctacaaggtgatgccgtggtgctcaagattgcccgcctgcaggcccaggatgccggcatttatgagtgccacaccccctccactgatacccgctacctgggcagctacagcggcaaggtggagctgagagttcttccagatgtcctccaggtgtctgctgcccccccagggccccgaggccgccaggccccaacctcacccccacgcatgacggtgcatgaggggcaggagctggcactgggctgcctggcgaggacaagcacacagaagcacacacacctggcagtgtcctttgggcgatctgtgcccgaggcaccagttgggcggtcaactctgcaggaagtggtgggaatccggtcagacttggccgtggaggctggagctccctatgctgagcgattggctgcaggggagcttcgtctgggcaaggaagggaccgatcggtaccgcatggtagtagggggtgcccaggcaggggacgcaggcacctaccactgcactgccgctgagtggattcaggatcctgatggcagctgggcccagattgcagagaaaagggccgtcctggcccacgtggatgtgcagacgctgtccagccagctggcagtgacagtggggcctggtgaacgtcggatcggcccaggggagcccttggaactgctgtgcaatgtgtcaggggcacttcccccagcaggccgtcatgctgcatactctgtaggttgggagatggcacctgcgggggcacctgggcccggccgcctggtagcccagctggacacagagggtgtgggcagcctgggccctggctatgagggccgacacattgccatggagaaggtggcatccagaacataccggctacggctagaggctgccaggcctggtgatgcgggcacctaccgctgcctcgccaaagcctatgttcgagggtctgggacccggcttcgtgaagcagccagtgcccgttcccggcctctccctgtacatgtgcgggaggaaggtgtggtgctggaggctgtggcatggctagcaggaggcacagtgtaccgcggggagactgcctccctgctgtgcaacatctctgtgcggggtggccccccaggactgcggctggccgccagctggtgggtggagcgaccagaggacggagagctcagctctgtccctgcccagctggtgggtggcgtaggccaggatggtgtggcagagctgggagtccggcctggaggaggccctgtcagcgtagagctggtggggccccgaagccatcggctgagactacacagcttggggcccgaggatgaaggcgtgtaccactgtgcccccagcgcctgggtgcagcatgccgactacagctggtaccaggcgggcagtgcccgctcagggcctgttacagtctacccctacatgcatgccctggacaccctatttgtgcctctgctggtgggtacaggggtggccctagtcactggtgccactgtccttggtaccatcacttgctgcttcatgaagaggcttcgaaaacgg

SEQ ID NO: 204 - protein, 995 aa, Artificial Sequence
  Synthetic Construct
DYKDHDGDYKDHDIDYKDDDDKSSGLVPRGSHMASMTGGQQMGRGSSGLSGETGQSGNTTIEEDSTTHVKFSKRDANGKELAGAMIELRNLSGQTIQSWISDGTVKVFYLMPGTYQFVETAAPEGYELAAPITFTIDEKGQIWVDSAMVDTLSGLSSEQGQSGDDSATHIKFSKRDEDGKELAGATMELRDSSGKTISTWISDGQVKDFYLYPGKYTFVETAAPDGYEVATAITFTVNEQGQVTVNGGGGGSGGGGSGSHMKPLRGAVFSLQKQHPDYPDIYGAIDQNGTYQNVRTGEDGKLTFKNLSDGKYRLFENSEPAGYKPVQNKPIVAFQIVNGEVRDVTSIVPQDIPATYEFTNGKHYITNEPIPPKGSPANLKALEAQKQKEQRQAAEELANAKKLKEQLEKREVLVPEGPLYRVAGTAVSISCNVTGYEGPAQQNFEWFLYRPEAPDTALGIVSTKDTQFSYAVFKSRVVAGEVQVQRLQGDAVVLKIARLQAQDAGIYECHTPSTDTRYLGSYSGKVELRVLPDVLQVSAAPPGPRGRQAPTSPPRMTVHEGQELALGCLARTSTQKHTHLAVSFGRSVPEAPVGRSTLQEVVGIRSDLAVEAGAPYAERLAAGELRLGKEGTDRYRMVVGGAQAGDAGTYHCTAAEWIQDPDGSWAQIAEKRAVLAHVDVQTLSSQLAVTVGPGERRIGPGEPLELLCNVSGALPPAGRHAAYSVGWEMAPAGAPGPGRLVAQLDTEGVGSLGPGYEGRHIAMEKVASRTYRLRLEAARPGDAGTYRCLAKAYVRGSGTRLREAASARSRPLPVHVREEGVVLEAVAWLAGGTVYRGETASLLCNISVRGGPPGLRLAASWWVERPEDGELSSVPAQLVGGVGQDGVAELGVRPGGGPVSVELVGPRSHRLRLHSLGPEDEGVYHCAPSAWVQHADYSWYQAGSARSGPVTVYPYMHALDTLFVPLLVGTGVALVTGATVLGTITCCFMKRLRKR

SEQ ID NO: 205 - DNA, 2490 bp, Artificial Sequence
  Isoeptide(1) + Isopeptide(3) IGSF8 scaffold
  CDS (1)..(2490)
ggttccgattacaaggatgacgatgacaagggttccgacagcgcaacacacatcaagttctcaaaacgggatgaggatggaaaagaactggccggagcgacaatggaactgagagattcttccggcaagactatctccacatggattagtgacgggcaagtcaaagacttctacttgtaccccggtaagtacaccttcgttgagactgccgctcctgacgggtatgaagtcgccacggcgatcacattcactgtgaatgaacagggacaggtgacggtcaatggaggcggtggcggctctggcggaggaggctcatcttctgggttggtccccagaggcagccacatggcttctatgaccgggggacaacaaatgggcagaggctcaagcggccttagcggtgaaactggacagagcggtaataccacgattgaggaggactccactacccatgtcaaattttctaaaagagacgcgaacggaaaggaattggctggcgcgatgattgaactgaggaacctctctggacagaccatacaaagctggatttcagacgggaccgttaaggttttctatctgatgcctggcacctaccagtttgttgaaactgcggcgccagaaggatatgagttggcggctcccatcacattcaccattgatgaaaagggtcaaatttgggtcgactcaggcggtggcggttcaggtgggggcggtagtggcggaggcggaagccgggaggtgctggtccccgaggggcccttgtaccgcgtggctggcacagctgtctccatctcctgcaatgtgaccggctatgagggccctgcccagcagaacttcgagtggttcctgtataggcccgaggccccagatactgcactgggcattgtcagtaccaaggatacccagttctcctatgctgtcttcaagtcccgagtggtggcgggtgaggtgcaggtgcagcgcctacaaggtgatgccgtggtgctcaagattgcccgcctgcaggcccaggatgccggcatttatgagtgccacaccccctccactgatacccgctacctgggcagctacagcggcaaggtggagctgagagttcttccagatgtcctccaggtgtctgctgcccccccagggccccgaggccgccaggccccaacctcacccccacgcatgacggtgcatgaggggcaggagctggcactgggctgcctggcgaggacaagcacacagaagcacacacacctggcagtgtcctttgggcgatctgtgcccgaggcaccagttgggcggtcaactctgcaggaagtggtgggaatccggtcagacttggccgtggaggctggagctccctatgctgagcgattggctgcaggggagcttcgtctgggcaaggaagggaccgatcggtaccgcatggtagtagggggtgcccaggcaggggacgcaggcacctaccactgcactgccgctgagtggattcaggatcctgatggcagctgggcccagattgcagagaaaagggccgtcctggcccacgtggatgtgcagacgctgtccagccagctggcagtgacagtggggcctggtgaacgtcggatcggcccaggggagcccttggaactgctgtgcaatgtgtcaggggcacttcccccagcaggccgtcatgctgcatactctgtaggttgggagatggcacctgcgggggcacctgggcccggccgcctggtagcccagctggacacagagggtgtgggcagcctgggccctggctatgagggccgacacattgccatggagaaggtggcatccagaacataccggctacggctagaggctgccaggcctggtgatgcgggcacctaccgctgcctcgccaaagcctatgttcgagggtctgggacccggcttcgtgaagcagccagtgcccgttcccggcctctccctgtacatgtgcgggaggaaggtgtggtgctggaggctgtggcatggctagcaggaggcacagtgtaccgcggggagactgcctccctgctgtgcaacatctctgtgcggggtggccccccaggactgcggctggccgccagctggtgggtggagcgaccagaggacggagagctcagctctgtccctgcccagctggtgggtggcgtaggccaggatggtgtggcagagctgggagtccggcctggaggaggccctgtcagcgtagagctggtggggccccgaagccatcggctgagactacacagcttggggcccgaggatgaaggcgtgtaccactgtgcccccagcgcctgggtgcagcatgccgactacagctggtaccaggcgggcagtgcccgctcagggcctgttacagtctacccctacatgcatgccctggacaccctatttgtgcctctgctggtgggtacaggggtggccctagtcactggtgccactgtccttggtaccatcacttgctgcttcatgaagaggcttcgaaaacgg

SEQ ID NO: 206 - protein, 830 aa, Artificial Sequence
  Synthetic Construct
GSDYKDDDDKGSDSATHIKFSKRDEDGKELAGATMELRDSSGKTISTWISDGQVKDFYLYPGKYTFVETAAPDGYEVATAITFTVNEQGQVTVNGGGGGSGGGGSSSGLVPRGSHMASMTGGQQMGRGSSGLSGETGQSGNTTIEEDSTTHVKFSKRDANGKELAGAMIELRNLSGQTIQSWISDGTVKVFYLMPGTYQFVETAAPEGYELAAPITFTIDEKGQIWVDSGGGGSGGGGSGGGGSREVLVPEGPLYRVAGTAVSISCNVTGYEGPAQQNFEWFLYRPEAPDTALGIVSTKDTQFSYAVFKSRVVAGEVQVQRLQGDAVVLKIARLQAQDAGIYECHTPSTDTRYLGSYSGKVELRVLPDVLQVSAAPPGPRGRQAPTSPPRMTVHEGQELALGCLARTSTQKHTHLAVSFGRSVPEAPVGRSTLQEVVGIRSDLAVEAGAPYAERLAAGELRLGKEGTDRYRMVVGGAQAGDAGTYHCTAAEWIQDPDGSWAQIAEKRAVLAHVDVQTLSSQLAVTVGPGERRIGPGEPLELLCNVSGALPPAGRHAAYSVGWEMAPAGAPGPGRLVAQLDTEGVGSLGPGYEGRHIAMEKVASRTYRLRLEAARPGDAGTYRCLAKAYVRGSGTRLREAASARSRPLPVHVREEGVVLEAVAWLAGGTVYRGETASLLCNISVRGGPPGLRLAASWWVERPEDGELSSVPAQLVGGVGQDGVAELGVRPGGGPVSVELVGPRSHRLRLHSLGPEDEGVYHCAPSAWVQHADYSWYQAGSARSGPVTVYPYMHALDTLFVPLLVGTGVALVTGATVLGTITCCFMKRLRKR

SEQ ID NO: 207 - DNA, 2490 bp, Artificial Sequence
  Isoeptide(3) + Isopeptide(1) IGSF8 scaffold
  CDS (1)..(2490)
ggttccgattacaaggatgacgatgacaagggttcctcttctgggttggtccccagaggcagccacatggcttctatgaccgggggacaacaaatgggcagaggctcaagcggccttagcggtgaaactggacagagcggtaataccacgattgaggaggactccactacccatgtcaaattttctaaaagagacgcgaacggaaaggaattggctggcgcgatgattgaactgaggaacctctctggacagaccatacaaagctggatttcagacgggaccgttaaggttttctatctgatgcctggcacctaccagtttgttgaaactgcggcgccagaaggatatgagttggcggctcccatcacattcaccattgatgaaaagggtcaaatttgggtcgactcaggcggtggcggctctggcggaggaggctcagacagcgcaacacacatcaagttctcaaaacgggatgaggatggaaaagaactggccggagcgacaatggaactgagagattcttccggcaagactatctccacatggattagtgacgggcaagtcaaagacttctacttgtaccccggtaagtacaccttcgttgagactgccgctcctgacgggtatgaagtcgccacggcgatcacattcactgtgaatgaacagggacaggtgacggtcaatggaggcggtggcggttcaggtgggggcggtagtggcggaggcggaagccgggaggtgctggtccccgaggggcccttgtaccgcgtggctggcacagctgtctccatctcctgcaatgtgaccggctatgagggccctgcccagcagaacttcgagtggttcctgtataggcccgaggccccagatactgcactgggcattgtcagtaccaaggatacccagttctcctatgctgtcttcaagtcccgagtggtggcgggtgaggtgcaggtgcagcgcctacaaggtgatgccgtggtgctcaagattgcccgcctgcaggcccaggatgccggcatttatgagtgccacaccccctccactgatacccgctacctgggcagctacagcggcaaggtggagctgagagttcttccagatgtcctccaggtgtctgctgcccccccagggccccgaggccgccaggccccaacctcacccccacgcatgacggtgcatgaggggcaggagctggcactgggctgcctggcgaggacaagcacacagaagcacacacacctggcagtgtcctttgggcgatctgtgcccgaggcaccagttgggcggtcaactctgcaggaagtggtgggaatccggtcagacttggccgtggaggctggagctccctatgctgagcgattggctgcaggggagcttcgtctgggcaaggaagggaccgatcggtaccgcatggtagtagggggtgcccaggcaggggacgcaggcacctaccactgcactgccgctgagtggattcaggatcctgatggcagctgggcccagattgcagagaaaagggccgtcctggcccacgtggatgtgcagacgctgtccagccagctggcagtgacagtggggcctggtgaacgtcggatcggcccaggggagcccttggaactgctgtgcaatgtgtcaggggcacttcccccagcaggccgtcatgctgcatactctgtaggttgggagatggcacctgcgggggcacctgggcccggccgcctggtagcccagctggacacagagggtgtgggcagcctgggccctggctatgagggccgacacattgccatggagaaggtggcatccagaacataccggctacggctagaggctgccaggcctggtgatgcgggcacctaccgctgcctcgccaaagcctatgttcgagggtctgggacccggcttcgtgaagcagccagtgcccgttcccggcctctccctgtacatgtgcgggaggaaggtgtggtgctggaggctgtggcatggctagcaggaggcacagtgtaccgcggggagactgcctccctgctgtgcaacatctctgtgcggggtggccccccaggactgcggctggccgccagctggtgggtggagcgaccagaggacggagagctcagctctgtccctgcccagctggtgggtggcgtaggccaggatggtgtggcagagctgggagtccggcctggaggaggccctgtcagcgtagagctggtggggccccgaagccatcggctgagactacacagcttggggcccgaggatgaaggcgtgtaccactgtgcccccagcgcctgggtgcagcatgccgactacagctggtaccaggcgggcagtgcccgctcagggcctgttacagtctacccctacatgcatgccctggacaccctatttgtgcctctgctggtgggtacaggggtggccctagtcactggtgccactgtccttggtaccatcacttgctgcttcatgaagaggcttcgaaaacgg

SEQ ID NO: 208 - protein, 830 aa, Artificial Sequence
  Synthetic Construct
GSDYKDDDDKGSSSGLVPRGSHMASMTGGQQMGRGSSGLSGETGQSGNTTIEEDSTTHVKFSKRDANGKELAGAMIELRNLSGQTIQSWISDGTVKVFYLMPGTYQFVETAAPEGYELAAPITFTIDEKGQIWVDSGGGGSGGGGSDSATHIKFSKRDEDGKELAGATMELRDSSGKTISTWISDGQVKDFYLYPGKYTFVETAAPDGYEVATAITFTVNEQGQVTVNGGGGGSGGGGSGGGGSREVLVPEGPLYRVAGTAVSISCNVTGYEGPAQQNFEWFLYRPEAPDTALGIVSTKDTQFSYAVFKSRVVAGEVQVQRLQGDAVVLKIARLQAQDAGIYECHTPSTDTRYLGSYSGKVELRVLPDVLQVSAAPPGPRGRQAPTSPPRMTVHEGQELALGCLARTSTQKHTHLAVSFGRSVPEAPVGRSTLQEVVGIRSDLAVEAGAPYAERLAAGELRLGKEGTDRYRMVVGGAQAGDAGTYHCTAAEWIQDPDGSWAQIAEKRAVLAHVDVQTLSSQLAVTVGPGERRIGPGEPLELLCNVSGALPPAGRHAAYSVGWEMAPAGAPGPGRLVAQLDTEGVGSLGPGYEGRHIAMEKVASRTYRLRLEAARPGDAGTYRCLAKAYVRGSGTRLREAASARSRPLPVHVREEGVVLEAVAWLAGGTVYRGETASLLCNISVRGGPPGLRLAASWWVERPEDGELSSVPAQLVGGVGQDGVAELGVRPGGGPVSVELVGPRSHRLRLHSLGPEDEGVYHCAPSAWVQHADYSWYQAGSARSGPVTVYPYMHALDTLFVPLLVGTGVALVTGATVLGTITCCFMKRLRKR

SEQ ID NO: 209 - DNA, 1983 bp, Artificial Sequence
  Isoeptide(3) + Isopeptide(1) Lamp2-IL3RA scaffold
  CDS (1)..(1983)
ggttccgattacaaggatgacgatgacaagggttcctcttctgggttggtccccagaggcagccacatggcttctatgaccgggggacaacaaatgggcagaggctcaagcggccttagcggtgaaactggacagagcggtaataccacgattgaggaggactccactacccatgtcaaattttctaaaagagacgcgaacggaaaggaattggctggcgcgatgattgaactgaggaacctctctggacagaccatacaaagctggatttcagacgggaccgttaaggttttctatctgatgcctggcacctaccagtttgttgaaactgcggcgccagaaggatatgagttggcggctcccatcacattcaccattgatgaaaagggtcaaatttgggtcgactcaggcggtggcggctctggcggaggaggctcagacagcgcaacacacatcaagttctcaaaacgggatgaggatggaaaagaactggccggagcgacaatggaactgagagattcttccggcaagactatctccacatggattagtgacgggcaagtcaaagacttctacttgtaccccggtaagtacaccttcgttgagactgccgctcctgacgggtatgaagtcgccacggcgatcacattcactgtgaatgaacagggacaggtgacggtcaatggaggcggtggcggttcaggtgggggcggtagtggcggaggcggaagcttggaacttaatttgacagattcagaaaatgccacttgcctttatgcaaaatggcagatgaatttcacagtacgctatgaaactacaaataaaacttataaaactgtaaccatttcagaccatggcactgtgacatataatggaagcatttgtggggatgatcagaatggtcccaaaatagcagtgcagttcggacctggcttttcctggattgcgaattttaccaaggcagcatctacttattcaattgacagcgtctcattttcctacaacactggtgataacacaacatttcctgatgctgaagataaaggaattcttactgttgatgaacttttggccatcagaattccattgaatgacctttttagatgcaatagtttatcaactttggaaaagaatgatgttgtccaacactactgggatgttcttgtacaagcttttgtccaaaatggcacagtgagcacaaatgagttcctgtgtgataaagacaaaacttcaacagtggcacccaccatacacaccactgtgccatctcctactacaacacctactccaaaggaaaaaccagaagctggaacctattcagttaataatggcaatgatacttgtctgctggctaccatggggctgcagctgaacatcactcaggataaggttgcttcagttattaacatcaaccccaatacaactcactccacaggcagctgccgttctcacactgctctacttagactcaatagcagcaccattaagtatctagactttgtctttgctgtgaaaaatgaaaaccgattttatctgaaggaagtgaacatcagcatgtatttggttaatggctccgttttcagcattgcaaataacaatctcagctactgggatgcccccctgggaagttcttatatgtgcaacaaagagcagactgtttcagtgtctggagcatttcagataaatacctttgatctaagggttcagcctttcaatgtgacacaaggaaagtattctacagcccaagagtgttcgctggatgatgacaccattctaatcccaattatagttggtgctggtctttcaggcttgattatcgttatagtgattgctgtgatgcagagactctttccccgcatccctcacatgaaagaccccatcggtgacagcttccaaaacgacaagctggtggtctgggaggcgggcaaagccggcctggaggagtgtctggtgactgaagtacaggtcgtgcagaaaacttga

SEQ ID NO: 210 - protein, 660 aa, Artificial Sequence
  Synthetic Construct
GSDYKDDDDKGSSSGLVPRGSHMASMTGGQQMGRGSSGLSGETGQSGNTTIEEDSTTHVKFSKRDANGKELAGAMIELRNLSGQTIQSWISDGTVKVFYLMPGTYQFVETAAPEGYELAAPITFTIDEKGQIWVDSGGGGSGGGGSDSATHIKFSKRDEDGKELAGATMELRDSSGKTISTWISDGQVKDFYLYPGKYTFVETAAPDGYEVATAITFTVNEQGQVTVNGGGGGSGGGGSGGGGSLELNLTDSENATCLYAKWQMNFTVRYETTNKTYKTVTISDHGTVTYNGSICGDDQNGPKIAVQFGPGFSWIANFTKAASTYSIDSVSFSYNTGDNTTFPDAEDKGILTVDELLAIRIPLNDLFRCNSLSTLEKNDVVQHYWDVLVQAFVQNGTVSTNEFLCDKDKTSTVAPTIHTTVPSPTTTPTPKEKPEAGTYSVNNGNDTCLLATMGLQLNITQDKVASVININPNTTHSTGSCRSHTALLRLNSSTIKYLDFVFAVKNENRFYLKEVNISMYLVNGSVFSIANNNLSYWDAPLGSSYMCNKEQTVSVSGAFQINTFDLRVQPFNVTQGKYSTAQECSLDDDTILIPIIVGAGLSGLIIVIVIAVMQRLFPRIPHMKDPIGDSFQNDKLVVWEAGKAGLEECLVTEVQVVQKT

SEQ ID NO: 211 - DNA, 2043 bp, Artificial Sequence
  Isoeptide(3) + Isopeptide(1) Lamp2-SELPL scaffold
  CDS (1)..(2043)
ggttccgattacaaggatgacgatgacaagggttcctcttctgggttggtccccagaggcagccacatggcttctatgaccgggggacaacaaatgggcagaggctcaagcggccttagcggtgaaactggacagagcggtaataccacgattgaggaggactccactacccatgtcaaattttctaaaagagacgcgaacggaaaggaattggctggcgcgatgattgaactgaggaacctctctggacagaccatacaaagctggatttcagacgggaccgttaaggttttctatctgatgcctggcacctaccagtttgttgaaactgcggcgccagaaggatatgagttggcggctcccatcacattcaccattgatgaaaagggtcaaatttgggtcgactcaggcggtggcggctctggcggaggaggctcagacagcgcaacacacatcaagttctcaaaacgggatgaggatggaaaagaactggccggagcgacaatggaactgagagattcttccggcaagactatctccacatggattagtgacgggcaagtcaaagacttctacttgtaccccggtaagtacaccttcgttgagactgccgctcctgacgggtatgaagtcgccacggcgatcacattcactgtgaatgaacagggacaggtgacggtcaatggaggcggtggcggttcaggtgggggcggtagtggcggaggcggaagcttggaacttaatttgacagattcagaaaatgccacttgcctttatgcaaaatggcagatgaatttcacagtacgctatgaaactacaaataaaacttataaaactgtaaccatttcagaccatggcactgtgacatataatggaagcatttgtggggatgatcagaatggtcccaaaatagcagtgcagttcggacctggcttttcctggattgcgaattttaccaaggcagcatctacttattcaattgacagcgtctcattttcctacaacactggtgataacacaacatttcctgatgctgaagataaaggaattcttactgttgatgaacttttggccatcagaattccattgaatgacctttttagatgcaatagtttatcaactttggaaaagaatgatgttgtccaacactactgggatgttcttgtacaagcttttgtccaaaatggcacagtgagcacaaatgagttcctgtgtgataaagacaaaacttcaacagtggcacccaccatacacaccactgtgccatctcctactacaacacctactccaaaggaaaaaccagaagctggaacctattcagttaataatggcaatgatacttgtctgctggctaccatggggctgcagctgaacatcactcaggataaggttgcttcagttattaacatcaaccccaatacaactcactccacaggcagctgccgttctcacactgctctacttagactcaatagcagcaccattaagtatctagactttgtctttgctgtgaaaaatgaaaaccgattttatctgaaggaagtgaacatcagcatgtatttggttaatggctccgttttcagcattgcaaataacaatctcagctactgggatgcccccctgggaagttcttatatgtgcaacaaagagcagactgtttcagtgtctggagcatttcagataaatacctttgatctaagggttcagcctttcaatgtgacacaaggaaagtattctacagcccaagagtgttcgctggatgatgacaccattctaatcccaattatagttggtgctggtctttcaggcttgattatcgttatagtgattgctcgcctctcccgcaagggccacatgtaccccgtgcgtaattactcccccaccgagatggtctgcatctcatccctgttgcctgatgggggtgaggggccctctgccacagccaatgggggcctgtccaaggccaagagcccgggcctgacgccagagcccagggaggaccgtgagggggatgacctcaccctgcacagcttcctcccttag

SEQ ID NO: 212 - protein, 680 aa, Artificial Sequence
  Synthetic Construct
GSDYKDDDDKGSSSGLVPRGSHMASMTGGQQMGRGSSGLSGETGQSGNTTIEEDSTTHVKFSKRDANGKELAGAMIELRNLSGQTIQSWISDGTVKVFYLMPGTYQFVETAAPEGYELAAPITFTIDEKGQIWVDSGGGGSGGGGSDSATHIKFSKRDEDGKELAGATMELRDSSGKTISTWISDGQVKDFYLYPGKYTFVETAAPDGYEVATAITFTVNEQGQVTVNGGGGGSGGGGSGGGGSLELNLTDSENATCLYAKWQMNFTVRYETTNKTYKTVTISDHGTVTYNGSICGDDQNGPKIAVQFGPGFSWIANFTKAASTYSIDSVSFSYNTGDNTTFPDAEDKGILTVDELLAIRIPLNDLFRCNSLSTLEKNDVVQHYWDVLVQAFVQNGTVSTNEFLCDKDKTSTVAPTIHTTVPSPTTTPTPKEKPEAGTYSVNNGNDTCLLATMGLQLNITQDKVASVININPNTTHSTGSCRSHTALLRLNSSTIKYLDFVFAVKNENRFYLKEVNISMYLVNGSVFSIANNNLSYWDAPLGSSYMCNKEQTVSVSGAFQINTFDLRVQPFNVTQGKYSTAQECSLDDDTILIPIIVGAGLSGLIIVIVIARLSRKGHMYPVRNYSPTEMVCISSLLPDGGEGPSATANGGLSKAKSPGLTPEPREDREGDDLTLHSFLP

SEQ ID NO: 213 - DNA, 1914 bp, Artificial Sequence
  Isoeptide(3) + Isopeptide(1) Lamp2-PTGFRN scaffold
  CDS (1)..(1914)
ggttccgattacaaggatgacgatgacaagggttcctcttctgggttggtccccagaggcagccacatggcttctatgaccgggggacaacaaatgggcagaggctcaagcggccttagcggtgaaactggacagagcggtaataccacgattgaggaggactccactacccatgtcaaattttctaaaagagacgcgaacggaaaggaattggctggcgcgatgattgaactgaggaacctctctggacagaccatacaaagctggatttcagacgggaccgttaaggttttctatctgatgcctggcacctaccagtttgttgaaactgcggcgccagaaggatatgagttggcggctcccatcacattcaccattgatgaaaagggtcaaatttgggtcgactcaggcggtggcggctctggcggaggaggctcagacagcgcaacacacatcaagttctcaaaacgggatgaggatggaaaagaactggccggagcgacaatggaactgagagattcttccggcaagactatctccacatggattagtgacgggcaagtcaaagacttctacttgtaccccggtaagtacaccttcgttgagactgccgctcctgacgggtatgaagtcgccacggcgatcacattcactgtgaatgaacagggacaggtgacggtcaatggaggcggtggcggttcaggtgggggcggtagtggcggaggcggaagcttggaacttaatttgacagattcagaaaatgccacttgcctttatgcaaaatggcagatgaatttcacagtacgctatgaaactacaaataaaacttataaaactgtaaccatttcagaccatggcactgtgacatataatggaagcatttgtggggatgatcagaatggtcccaaaatagcagtgcagttcggacctggcttttcctggattgcgaattttaccaaggcagcatctacttattcaattgacagcgtctcattttcctacaacactggtgataacacaacatttcctgatgctgaagataaaggaattcttactgttgatgaacttttggccatcagaattccattgaatgacctttttagatgcaatagtttatcaactttggaaaagaatgatgttgtccaacactactgggatgttcttgtacaagcttttgtccaaaatggcacagtgagcacaaatgagttcctgtgtgataaagacaaaacttcaacagtggcacccaccatacacaccactgtgccatctcctactacaacacctactccaaaggaaaaaccagaagctggaacctattcagttaataatggcaatgatacttgtctgctggctaccatggggctgcagctgaacatcactcaggataaggttgcttcagttattaacatcaaccccaatacaactcactccacaggcagctgccgttctcacactgctctacttagactcaatagcagcaccattaagtatctagactttgtctttgctgtgaaaaatgaaaaccgattttatctgaaggaagtgaacatcagcatgtatttggttaatggctccgttttcagcattgcaaataacaatctcagctactgggatgcccccctgggaagttcttatatgtgcaacaaagagcagactgtttcagtgtctggagcatttcagataaatacctttgatctaagggttcagcctttcaatgtgacacaaggaaagtattctacagcccaagagtgttcgctggatgatgacaccattctaatcccaattatagttggtgctggtctttcaggcttgattatcgttatagtgattgctagctcccactggtgttgtaagaaggaggttcaggagacacggcgcgagcgccgcaggctcatgtcgatggagatggactag

SEQ ID NO: 214 - protein, 637 aa, Artificial Sequence
  Synthetic Construct
GSDYKDDDDKGSSSGLVPRGSHMASMTGGQQMGRGSSGLSGETGQSGNTTIEEDSTTHVKFSKRDANGKELAGAMIELRNLSGQTIQSWISDGTVKVFYLMPGTYQFVETAAPEGYELAAPITFTIDEKGQIWVDSGGGGSGGGGSDSATHIKFSKRDEDGKELAGATMELRDSSGKTISTWISDGQVKDFYLYPGKYTFVETAAPDGYEVATAITFTVNEQGQVTVNGGGGGSGGGGSGGGGSLELNLTDSENATCLYAKWQMNFTVRYETTNKTYKTVTISDHGTVTYNGSICGDDQNGPKIAVQFGPGFSWIANFTKAASTYSIDSVSFSYNTGDNTTFPDAEDKGILTVDELLAIRIPLNDLFRCNSLSTLEKNDVVQHYWDVLVQAFVQNGTVSTNEFLCDKDKTSTVAPTIHTTVPSPTTTPTPKEKPEAGTYSVNNGNDTCLLATMGLQLNITQDKVASVININPNTTHSTGSCRSHTALLRLNSSTIKYLDFVFAVKNENRFYLKEVNISMYLVNGSVFSIANNNLSYWDAPLGSSYMCNKEQTVSVSGAFQINTFDLRVQPFNVTQGKYSTAQECSLDDDTILIPIIVGAGLSGLIIVIVIASSHWCCKKEVQETRRERRRLMSMEMD

SEQ ID NO: 215 - DNA, 1980 bp, Artificial Sequence
  Isopeptide(1) tag-IGSF8
  CDS (1)..(1980)
gactacaaagaccacgacggggattataaagatcatgacatcgattacaaggatgacgatgataagggctctggcgcacacatcgttatggtcgacgcatacaaaccaacaaagggatcccccgccaacctgaaggccctggaggcccagaagcagaaggagcagagacaggccgccgaggagctggccaacgccaagaagctgaaggagcagctggagaagcgggaggtgctggtccccgaggggcccttgtaccgcgtggctggcacagctgtctccatctcctgcaatgtgaccggctatgagggccctgcccagcagaacttcgagtggttcctgtataggcccgaggccccagatactgcactgggcattgtcagtaccaaggatacccagttctcctatgctgtcttcaagtcccgagtggtggcgggtgaggtgcaggtgcagcgcctacaaggtgatgccgtggtgctcaagattgcccgcctgcaggcccaggatgccggcatttatgagtgccacaccccctccactgatacccgctacctgggcagctacagcggcaaggtggagctgagagttcttccagatgtcctccaggtgtctgctgcccccccagggccccgaggccgccaggccccaacctcacccccacgcatgacggtgcatgaggggcaggagctggcactgggctgcctggcgaggacaagcacacagaagcacacacacctggcagtgtcctttgggcgatctgtgcccgaggcaccagttgggcggtcaactctgcaggaagtggtgggaatccggtcagacttggccgtggaggctggagctccctatgctgagcgattggctgcaggggagcttcgtctgggcaaggaagggaccgatcggtaccgcatggtagtagggggtgcccaggcaggggacgcaggcacctaccactgcactgccgctgagtggattcaggatcctgatggcagctgggcccagattgcagagaaaagggccgtcctggcccacgtggatgtgcagacgctgtccagccagctggcagtgacagtggggcctggtgaacgtcggatcggcccaggggagcccttggaactgctgtgcaatgtgtcaggggcacttcccccagcaggccgtcatgctgcatactctgtaggttgggagatggcacctgcgggggcacctgggcccggccgcctggtagcccagctggacacagagggtgtgggcagcctgggccctggctatgagggccgacacattgccatggagaaggtggcatccagaacataccggctacggctagaggctgccaggcctggtgatgcgggcacctaccgctgcctcgccaaagcctatgttcgagggtctgggacccggcttcgtgaagcagccagtgcccgttcccggcctctccctgtacatgtgcgggaggaaggtgtggtgctggaggctgtggcatggctagcaggaggcacagtgtaccgcggggagactgcctccctgctgtgcaacatctctgtgcggggtggccccccaggactgcggctggccgccagctggtgggtggagcgaccagaggacggagagctcagctctgtccctgcccagctggtgggtggcgtaggccaggatggtgtggcagagctgggagtccggcctggaggaggccctgtcagcgtagagctggtggggccccgaagccatcggctgagactacacagcttggggcccgaggatgaaggcgtgtaccactgtgcccccagcgcctgggtgcagcatgccgactacagctggtaccaggcgggcagtgcccgctcagggcctgttacagtctacccctacatgcatgccctggacaccctatttgtgcctctgctggtgggtacaggggtggccctagtcactggtgccactgtccttggtaccatcacttgctgcttcatgaagaggcttcgaaaacgg

SEQ ID NO: 216 - protein, 660 aa, Artificial Sequence
  Synthetic Construct
DYKDHDGDYKDHDIDYKDDDDKGSGAHIVMVDAYKPTKGSPANLKALEAQKQKEQRQAAEELANAKKLKEQLEKREVLVPEGPLYRVAGTAVSISCNVTGYEGPAQQNFEWFLYRPEAPDTALGIVSTKDTQFSYAVFKSRVVAGEVQVQRLQGDAVVLKIARLQAQDAGIYECHTPSTDTRYLGSYSGKVELRVLPDVLQVSAAPPGPRGRQAPTSPPRMTVHEGQELALGCLARTSTQKHTHLAVSFGRSVPEAPVGRSTLQEVVGIRSDLAVEAGAPYAERLAAGELRLGKEGTDRYRMVVGGAQAGDAGTYHCTAAEWIQDPDGSWAQIAEKRAVLAHVDVQTLSSQLAVTVGPGERRIGPGEPLELLCNVSGALPPAGRHAAYSVGWEMAPAGAPGPGRLVAQLDTEGVGSLGPGYEGRHIAMEKVASRTYRLRLEAARPGDAGTYRCLAKAYVRGSGTRLREAASARSRPLPVHVREEGVVLEAVAWLAGGTVYRGETASLLCNISVRGGPPGLRLAASWWVERPEDGELSSVPAQLVGGVGQDGVAELGVRPGGGPVSVELVGPRSHRLRLHSLGPEDEGVYHCAPSAWVQHADYSWYQAGSARSGPVTVYPYMHALDTLFVPLLVGTGVALVTGATVLGTITCCFMKRLRKR

SEQ ID NO: 217 - DNA, 1977 bp, Artificial Sequence
  Isopeptide(2) tag-IGSF8
  CDS (1)..(1977)
gactacaaagaccacgacggggattataaagatcatgacatcgattacaaggatgacgatgataagggctctggcaagttaggcgatatcgaattcattaaagtcaataagggatcccccgccaacctgaaggccctggaggcccagaagcagaaggagcagagacaggccgccgaggagctggccaacgccaagaagctgaaggagcagctggagaagcgggaggtgctggtccccgaggggcccttgtaccgcgtggctggcacagctgtctccatctcctgcaatgtgaccggctatgagggccctgcccagcagaacttcgagtggttcctgtataggcccgaggccccagatactgcactgggcattgtcagtaccaaggatacccagttctcctatgctgtcttcaagtcccgagtggtggcgggtgaggtgcaggtgcagcgcctacaaggtgatgccgtggtgctcaagattgcccgcctgcaggcccaggatgccggcatttatgagtgccacaccccctccactgatacccgctacctgggcagctacagcggcaaggtggagctgagagttcttccagatgtcctccaggtgtctgctgcccccccagggccccgaggccgccaggccccaacctcacccccacgcatgacggtgcatgaggggcaggagctggcactgggctgcctggcgaggacaagcacacagaagcacacacacctggcagtgtcctttgggcgatctgtgcccgaggcaccagttgggcggtcaactctgcaggaagtggtgggaatccggtcagacttggccgtggaggctggagctccctatgctgagcgattggctgcaggggagcttcgtctgggcaaggaagggaccgatcggtaccgcatggtagtagggggtgcccaggcaggggacgcaggcacctaccactgcactgccgctgagtggattcaggatcctgatggcagctgggcccagattgcagagaaaagggccgtcctggcccacgtggatgtgcagacgctgtccagccagctggcagtgacagtggggcctggtgaacgtcggatcggcccaggggagcccttggaactgctgtgcaatgtgtcaggggcacttcccccagcaggccgtcatgctgcatactctgtaggttgggagatggcacctgcgggggcacctgggcccggccgcctggtagcccagctggacacagagggtgtgggcagcctgggccctggctatgagggccgacacattgccatggagaaggtggcatccagaacataccggctacggctagaggctgccaggcctggtgatgcgggcacctaccgctgcctcgccaaagcctatgttcgagggtctgggacccggcttcgtgaagcagccagtgcccgttcccggcctctccctgtacatgtgcgggaggaaggtgtggtgctggaggctgtggcatggctagcaggaggcacagtgtaccgcggggagactgcctccctgctgtgcaacatctctgtgcggggtggccccccaggactgcggctggccgccagctggtgggtggagcgaccagaggacggagagctcagctctgtccctgcccagctggtgggtggcgtaggccaggatggtgtggcagagctgggagtccggcctggaggaggccctgtcagcgtagagctggtggggccccgaagccatcggctgagactacacagcttggggcccgaggatgaaggcgtgtaccactgtgcccccagcgcctgggtgcagcatgccgactacagctggtaccaggcgggcagtgcccgctcagggcctgttacagtctacccctacatgcatgccctggacaccctatttgtgcctctgctggtgggtacaggggtggccctagtcactggtgccactgtccttggtaccatcacttgctgcttcatgaagaggcttcgaaaacgg

SEQ ID NO: 218 - protein, 659 aa, Artificial Sequence
  Synthetic Construct
DYKDHDGDYKDHDIDYKDDDDKGSGKLGDIEFIKVNKGSPANLKALEAQKQKEQRQAAEELANAKKLKEQLEKREVLVPEGPLYRVAGTAVSISCNVTGYEGPAQQNFEWFLYRPEAPDTALGIVSTKDTQFSYAVFKSRVVAGEVQVQRLQGDAVVLKIARLQAQDAGIYECHTPSTDTRYLGSYSGKVELRVLPDVLQVSAAPPGPRGRQAPTSPPRMTVHEGQELALGCLARTSTQKHTHLAVSFGRSVPEAPVGRSTLQEVVGIRSDLAVEAGAPYAERLAAGELRLGKEGTDRYRMVVGGAQAGDAGTYHCTAAEWIQDPDGSWAQIAEKRAVLAHVDVQTLSSQLAVTVGPGERRIGPGEPLELLCNVSGALPPAGRHAAYSVGWEMAPAGAPGPGRLVAQLDTEGVGSLGPGYEGRHIAMEKVASRTYRLRLEAARPGDAGTYRCLAKAYVRGSGTRLREAASARSRPLPVHVREEGVVLEAVAWLAGGTVYRGETASLLCNISVRGGPPGLRLAASWWVERPEDGELSSVPAQLVGGVGQDGVAELGVRPGGGPVSVELVGPRSHRLRLHSLGPEDEGVYHCAPSAWVQHADYSWYQAGSARSGPVTVYPYMHALDTLFVPLLVGTGVALVTGATVLGTITCCFMKRLRKR

SEQ ID NO: 219 - DNA, 2046 bp, Artificial Sequence
  Isopeptide(1) tag+Isopeptide(2) tag-IGSF8
  CDS (1)..(2046)
gactacaaagaccacgacggggattataaagatcatgacatcgattacaaggatgacgatgataagggctctggcgcacacatcgttatggtcgacgcatacaaaccaacaaagggcggtggcggctctggcggaggaggctcaaagttaggcgatatcgaattcattaaagtcaataagggatcccccgccaacctgaaggccctggaggcccagaagcagaaggagcagagacaggccgccgaggagctggccaacgccaagaagctgaaggagcagctggagaagcgggaggtgctggtccccgaggggcccttgtaccgcgtggctggcacagctgtctccatctcctgcaatgtgaccggctatgagggccctgcccagcagaacttcgagtggttcctgtataggcccgaggccccagatactgcactgggcattgtcagtaccaaggatacccagttctcctatgctgtcttcaagtcccgagtggtggcgggtgaggtgcaggtgcagcgcctacaaggtgatgccgtggtgctcaagattgcccgcctgcaggcccaggatgccggcatttatgagtgccacaccccctccactgatacccgctacctgggcagctacagcggcaaggtggagctgagagttcttccagatgtcctccaggtgtctgctgcccccccagggccccgaggccgccaggccccaacctcacccccacgcatgacggtgcatgaggggcaggagctggcactgggctgcctggcgaggacaagcacacagaagcacacacacctggcagtgtcctttgggcgatctgtgcccgaggcaccagttgggcggtcaactctgcaggaagtggtgggaatccggtcagacttggccgtggaggctggagctccctatgctgagcgattggctgcaggggagcttcgtctgggcaaggaagggaccgatcggtaccgcatggtagtagggggtgcccaggcaggggacgcaggcacctaccactgcactgccgctgagtggattcaggatcctgatggcagctgggcccagattgcagagaaaagggccgtcctggcccacgtggatgtgcagacgctgtccagccagctggcagtgacagtggggcctggtgaacgtcggatcggcccaggggagcccttggaactgctgtgcaatgtgtcaggggcacttcccccagcaggccgtcatgctgcatactctgtaggttgggagatggcacctgcgggggcacctgggcccggccgcctggtagcccagctggacacagagggtgtgggcagcctgggccctggctatgagggccgacacattgccatggagaaggtggcatccagaacataccggctacggctagaggctgccaggcctggtgatgcgggcacctaccgctgcctcgccaaagcctatgttcgagggtctgggacccggcttcgtgaagcagccagtgcccgttcccggcctctccctgtacatgtgcgggaggaaggtgtggtgctggaggctgtggcatggctagcaggaggcacagtgtaccgcggggagactgcctccctgctgtgcaacatctctgtgcggggtggccccccaggactgcggctggccgccagctggtgggtggagcgaccagaggacggagagctcagctctgtccctgcccagctggtgggtggcgtaggccaggatggtgtggcagagctgggagtccggcctggaggaggccctgtcagcgtagagctggtggggccccgaagccatcggctgagactacacagcttggggcccgaggatgaaggcgtgtaccactgtgcccccagcgcctgggtgcagcatgccgactacagctggtaccaggcgggcagtgcccgctcagggcctgttacagtctacccctacatgcatgccctggacaccctatttgtgcctctgctggtgggtacaggggtggccctagtcactggtgccactgtccttggtaccatcacttgctgcttcatgaagaggcttcgaaaacgg

SEQ ID NO: 220 - protein, 682 aa, Artificial Sequence
  Synthetic Construct
DYKDHDGDYKDHDIDYKDDDDKGSGAHIVMVDAYKPTKGGGGSGGGGSKLGDIEFIKVNKGSPANLKALEAQKQKEQRQAAEELANAKKLKEQLEKREVLVPEGPLYRVAGTAVSISCNVTGYEGPAQQNFEWFLYRPEAPDTALGIVSTKDTQFSYAVFKSRVVAGEVQVQRLQGDAVVLKIARLQAQDAGIYECHTPSTDTRYLGSYSGKVELRVLPDVLQVSAAPPGPRGRQAPTSPPRMTVHEGQELALGCLARTSTQKHTHLAVSFGRSVPEAPVGRSTLQEVVGIRSDLAVEAGAPYAERLAAGELRLGKEGTDRYRMVVGGAQAGDAGTYHCTAAEWIQDPDGSWAQIAEKRAVLAHVDVQTLSSQLAVTVGPGERRIGPGEPLELLCNVSGALPPAGRHAAYSVGWEMAPAGAPGPGRLVAQLDTEGVGSLGPGYEGRHIAMEKVASRTYRLRLEAARPGDAGTYRCLAKAYVRGSGTRLREAASARSRPLPVHVREEGVVLEAVAWLAGGTVYRGETASLLCNISVRGGPPGLRLAASWWVERPEDGELSSVPAQLVGGVGQDGVAELGVRPGGGPVSVELVGPRSHRLRLHSLGPEDEGVYHCAPSAWVQHADYSWYQAGSARSGPVTVYPYMHALDTLFVPLLVGTGVALVTGATVLGTITCCFMKRLRKR

SEQ ID NO: 221 - DNA, 2130 bp, Artificial Sequence
  Isopeptide(1) tag+Isopeptide(2) tag+Isopeptide(3) tag-IGSF8
  CDS (1)..(2130)
gactacaaagaccacgacggggattataaagatcatgacatcgattacaaggatgacgatgataaggatccgatcgtaatgatagacaacgacaaaccaatcaccgccatggttgataccttatcaggtttatcaagtgagcaaggtcagtccggtgatgcacacatcgttatggtcgacgcatacaaaccaacaaagggcggtggcggctctggcggaggaggctcaaagttaggcgatatcgaattcattaaagtcaataagggatcccccgccaacctgaaggccctggaggcccagaagcagaaggagcagagacaggccgccgaggagctggccaacgccaagaagctgaaggagcagctggagaagcgggaggtgctggtccccgaggggcccttgtaccgcgtggctggcacagctgtctccatctcctgcaatgtgaccggctatgagggccctgcccagcagaacttcgagtggttcctgtataggcccgaggccccagatactgcactgggcattgtcagtaccaaggatacccagttctcctatgctgtcttcaagtcccgagtggtggcgggtgaggtgcaggtgcagcgcctacaaggtgatgccgtggtgctcaagattgcccgcctgcaggcccaggatgccggcatttatgagtgccacaccccctccactgatacccgctacctgggcagctacagcggcaaggtggagctgagagttcttccagatgtcctccaggtgtctgctgcccccccagggccccgaggccgccaggccccaacctcacccccacgcatgacggtgcatgaggggcaggagctggcactgggctgcctggcgaggacaagcacacagaagcacacacacctggcagtgtcctttgggcgatctgtgcccgaggcaccagttgggcggtcaactctgcaggaagtggtgggaatccggtcagacttggccgtggaggctggagctccctatgctgagcgattggctgcaggggagcttcgtctgggcaaggaagggaccgatcggtaccgcatggtagtagggggtgcccaggcaggggacgcaggcacctaccactgcactgccgctgagtggattcaggatcctgatggcagctgggcccagattgcagagaaaagggccgtcctggcccacgtggatgtgcagacgctgtccagccagctggcagtgacagtggggcctggtgaacgtcggatcggcccaggggagcccttggaactgctgtgcaatgtgtcaggggcacttcccccagcaggccgtcatgctgcatactctgtaggttgggagatggcacctgcgggggcacctgggcccggccgcctggtagcccagctggacacagagggtgtgggcagcctgggccctggctatgagggccgacacattgccatggagaaggtggcatccagaacataccggctacggctagaggctgccaggcctggtgatgcgggcacctaccgctgcctcgccaaagcctatgttcgagggtctgggacccggcttcgtgaagcagccagtgcccgttcccggcctctccctgtacatgtgcgggaggaaggtgtggtgctggaggctgtggcatggctagcaggaggcacagtgtaccgcggggagactgcctccctgctgtgcaacatctctgtgcggggtggccccccaggactgcggctggccgccagctggtgggtggagcgaccagaggacggagagctcagctctgtccctgcccagctggtgggtggcgtaggccaggatggtgtggcagagctgggagtccggcctggaggaggccctgtcagcgtagagctggtggggccccgaagccatcggctgagactacacagcttggggcccgaggatgaaggcgtgtaccactgtgcccccagcgcctgggtgcagcatgccgactacagctggtaccaggcgggcagtgcccgctcagggcctgttacagtctacccctacatgcatgccctggacaccctatttgtgcctctgctggtgggtacaggggtggccctagtcactggtgccactgtccttggtaccatcacttgctgcttcatgaagaggcttcgaaaacgg

SEQ ID NO: 222 - protein, 710 aa, Artificial Sequence
  Synthetic Construct
DYKDHDGDYKDHDIDYKDDDDKDPIVMIDNDKPITAMVDTLSGLSSEQGQSGDAHIVMVDAYKPTKGGGGSGGGGSKLGDIEFIKVNKGSPANLKALEAQKQKEQRQAAEELANAKKLKEQLEKREVLVPEGPLYRVAGTAVSISCNVTGYEGPAQQNFEWFLYRPEAPDTALGIVSTKDTQFSYAVFKSRVVAGEVQVQRLQGDAVVLKIARLQAQDAGIYECHTPSTDTRYLGSYSGKVELRVLPDVLQVSAAPPGPRGRQAPTSPPRMTVHEGQELALGCLARTSTQKHTHLAVSFGRSVPEAPVGRSTLQEVVGIRSDLAVEAGAPYAERLAAGELRLGKEGTDRYRMVVGGAQAGDAGTYHCTAAEWIQDPDGSWAQIAEKRAVLAHVDVQTLSSQLAVTVGPGERRIGPGEPLELLCNVSGALPPAGRHAAYSVGWEMAPAGAPGPGRLVAQLDTEGVGSLGPGYEGRHIAMEKVASRTYRLRLEAARPGDAGTYRCLAKAYVRGSGTRLREAASARSRPLPVHVREEGVVLEAVAWLAGGTVYRGETASLLCNISVRGGPPGLRLAASWWVERPEDGELSSVPAQLVGGVGQDGVAELGVRPGGGPVSVELVGPRSHRLRLHSLGPEDEGVYHCAPSAWVQHADYSWYQAGSARSGPVTVYPYMHALDTLFVPLLVGTGVALVTGATVLGTITCCFMKRLRKR

SEQ ID NO: 223 - DNA, 918 bp, Artificial Sequence
  FV6A6-Isopeptide(1) tag
  CDS (1)..(918)
ggttccgattacaaggatgacgatgacaagggttcccaaatgcagctggttcaaagtggtgctgaggtcaaaaaaccaggcgcgagcgtaaaactgtcctgtaaagccagcggatacaccttctccagctactggatgcactgggtccgacaggccccagggcagaggctcgaatggatgggcgagatcaaccccggcaatggtcacaccaattacaatgaaaagttcaagagccgcgtgaccattactgtcgataaatctgcatctacagcatacatggaactttccagccttagatcagaggacacagccgtatattattgtgccaagatctggggaccgtcccttacaagtcctttcgattactggggtcaggggacgcttgtaacggtatccggggggggaggttccggcggaggcggttcaggagggggcggttccgggggcggtggatctaattttatgcttacgcaacccccgtctgtaagtgtttccccagggaaaaccgctcgaataacctgtcgaggagacaacctcggcgatgttaatgtccattggtatcaacagcgacctgggcaagccccggttttggtcatgtactatgatgcggaccgccccagtggcataccggaacggttcagtggaagtaactctggcaatactgcaacgctgaccatcagtggcgttgaggcgggtgacgaggcagattattactgtcaggtctgggaccggaccagtgagtatgttttcggaaccggcacaaaagtaactgtactcgggggcggtggcggttcaggtgggggcggtagtggcggaggcggaagcggttctcatcaccatcaccaccatggaggagggggctctggcggtgggggttccgcccatatcgtcatggtcgatgcgattaagcctaccaag

SEQ ID NO: 224 - protein, 306 aa, Artificial Sequence
  Synthetic Construct
GSDYKDDDDKGSQMQLVQSGAEVKKPGASVKLSCKASGYTFSSYWMHWVRQAPGQRLEWMGEINPGNGHTNYNEKFKSRVTITVDKSASTAYMELSSLRSEDTAVYYCAKIWGPSLTSPFDYWGQGTLVTVSGGGGSGGGGSGGGGSGGGGSNFMLTQPPSVSVSPGKTARITCRGDNLGDVNVHWYQQRPGQAPVLVMYYDADRPSGIPERFSGSNSGNTATLTISGVEAGDEADYYCQVWDRTSEYVFGTGTKVTVLGGGGGSGGGGSGGGGSGSHHHHHHGGGGSGGGGSAHIVMVDAIKPTK

SEQ ID NO: 225 - DNA, 903 bp, Artificial Sequence
  FVALAC-Isopeptide(1) tag
  CDS (1)..(903)
ggttccgattacaaggatgacgatgacaagggttccgaagtgcagcttgtagaaagtgggggcggactggtacagccgggcgggagcctcagattgtcatgcgccgcttctggtttcactttttcttcctacggtatgtcctgggttagacaagctcctgggaagggtcttgagtgggtggctacaattactagtggtggttcatacacgtactatgttgacagtgttaaggggcgatttactataagtagagataatgccaagaacacactctaccttcagatgaatagcttgcgggcggaagatacagcagtttattattgcgttcggattggcgaggacgcactcgactattggggacaagggactcttgttacggtgtctagtggggggggaggttccggcggaggcggttcaggagggggcggttccgggggcggtggatctgacatccagatgacgcaatccccaagttcacttagcgcttcagtcggcgaccgcgttaccataacatgcagagcaagtcaagacattgcagggagtcttaattggttgcagaagccaggtaaagctataaagcgccttatatatgccaccagcagtctggattctggtgtaccgaagagattcagcggttccagaagtggcagtgactatactctgaccatttcttctctccagcctgaagatttcgccacttactattgtctgcaatatggttctttcccaccaacattcggacaaggtactaaggtcgagattaagggcggtggcggttcaggtgggggcggtagtggcggaggcggaagcggttctcatcaccatcaccaccatggaggagggggctctggcggtgggggttccgcccatatcgtcatggtcgatgcgattaagcctaccaag

SEQ ID NO: 226 - protein, 301 aa, Artificial Sequence
  Synthetic Construct
GSDYKDDDDKGSEVQLVESGGGLVQPGGSLRLSCAASGFTFSSYGMSWVRQAPGKGLEWVATITSGGSYTYYVDSVKGRFTISRDNAKNTLYLQMNSLRAEDTAVYYCVRIGEDALDYWGQGTLVTVSSGGGGSGGGGSGGGGSGGGGSDIQMTQSPSSLSASVGDRVTITCRASQDIAGSLNWLQKPGKAIKRLIYATSSLDSGVPKRFSGSRSGSDYTLTISSLQPEDFATYYCLQYGSFPPTFGQGTKVEIKGGGGSGGGGSGGGGSGSHHHHHHGGGGSGGGGSAHIVMVDAIKPTK

SEQ ID NO: 227 - DNA, 918 bp, Artificial Sequence
  Isopeptide(1) tag-FV6A6
  CDS (1)..(918)
gcccatatcgtcatggtcgatgcgattaagcctaccaagggaggagggggctctggcggtgggggttccggttccgattacaaggatgacgatgacaagggttcccaaatgcagctggttcaaagtggtgctgaggtcaaaaaaccaggcgcgagcgtaaaactgtcctgtaaagccagcggatacaccttctccagctactggatgcactgggtccgacaggccccagggcagaggctcgaatggatgggcgagatcaaccccggcaatggtcacaccaattacaatgaaaagttcaagagccgcgtgaccattactgtcgataaatctgcatctacagcatacatggaactttccagccttagatcagaggacacagccgtatattattgtgccaagatctggggaccgtcccttacaagtcctttcgattactggggtcaggggacgcttgtaacggtatccggggggggaggttccggcggaggcggttcaggagggggcggttccgggggcggtggatctaattttatgcttacgcaacccccgtctgtaagtgtttccccagggaaaaccgctcgaataacctgtcgaggagacaacctcggcgatgttaatgtccattggtatcaacagcgacctgggcaagccccggttttggtcatgtactatgatgcggaccgccccagtggcataccggaacggttcagtggaagtaactctggcaatactgcaacgctgaccatcagtggcgttgaggcgggtgacgaggcagattattactgtcaggtctgggaccggaccagtgagtatgttttcggaaccggcacaaaagtaactgtactcgggggcggtggcggttcaggtgggggcggtagtggcggaggcggaagcggttctcatcaccatcaccaccat

SEQ ID NO: 228 - protein, 306 aa, Artificial Sequence
  Synthetic Construct
AHIVMVDAIKPTKGGGGSGGGGSGSDYKDDDDKGSQMQLVQSGAEVKKPGASVKLSCKASGYTFSSYWMHWVRQAPGQRLEWMGEINPGNGHTNYNEKFKSRVTITVDKSASTAYMELSSLRSEDTAVYYCAKIWGPSLTSPFDYWGQGTLVTVSGGGGSGGGGSGGGGSGGGGSNFMLTQPPSVSVSPGKTARITCRGDNLGDVNVHWYQQRPGQAPVLVMYYDADRPSGIPERFSGSNSGNTATLTISGVEAGDEADYYCQVWDRTSEYVFGTGTKVTVLGGGGGSGGGGSGGGGSGSHHHHHH

SEQ ID NO: 229 - DNA, 855 bp, Artificial Sequence
  GC33 + Isopeptide(1) tag
  CDS (1)..(855)
caggtgcagctggtgcagagcggcgccgaggtgaagaagcccggcgccagcgtgaaggtgagctgcaaggccagcggctacaccttcaccgactacgagatgcactgggtgaggcaggcccccggccagggcctggagtggatgggcgccctggaccccaagaccggcgacaccgcctacagccagaagttcaagggcagggtgaccctgaccgccgacaagagcaccagcaccgcctacatggagctgagcagcctgaccagcgaggacaccgccgtgtactactgcaccaggttctacagctacacctactggggccagggcaccctggtgaccgtgagcagcagcagcggcggcagcagcaggagcagcagcagcggcggcggcggcagcggcggcggcggcgacgtggtgatgacccagagccccctgagcctgcccgtgacccccggcgagcccgccagcatcagctgcaggagcagccagagcctggtgcacagcaacggcaacacctacctgcactggtacctgcagaagcccggccagagcccccagctgctgatctacaaggtgagcaacaggttcagcggcgtgcccgacaggttcagcggcagcggcagcggcaccgacttcaccctgaagatcagcagggtggaggccgaggacgtgggcgtgtactactgcagccagaacacccacgtgccccccaccttcggccagggcaccaagctggagatcaagagcggcggcggcggcagcggcggcggcggcaaggagaccgccgccgccaagttcgagaggcagcacatggacagcgcccacatcgtgatggtggacgcctacaagcccaccaag

SEQ ID NO: 230 - protein, 285 aa, Artificial Sequence
  Synthetic Construct
QVQLVQSGAEVKKPGASVKVSCKASGYTFTDYEMHWVRQAPGQGLEWMGALDPKTGDTAYSQKFKGRVTLTADKSTSTAYMELSSLTSEDTAVYYCTRFYSYTYWGQGTLVTVSSSSGGSSRSSSSGGGGSGGGGDVVMTQSPLSLPVTPGEPASISCRSSQSLVHSNGNTYLHWYLQKPGQSPQLLIYKVSNRFSGVPDRFSGSGSGTDFTLKISRVEAEDVGVYYCSQNTHVPPTFGQGTKLEIKSGGGGSGGGGKETAAAKFERQHMDSAHIVMVDAYKPTK

SEQ ID NO: 231 - DNA, 837 bp, Artificial Sequence
  GC33 + Isopeptide(2) tag
  CDS (1)..(837)
caggtgcagctggtgcagagcggcgccgaggtgaagaagcccggcgccagcgtgaaggtgagctgcaaggccagcggctacaccttcaccgactacgagatgcactgggtgaggcaggcccccggccagggcctggagtggatgggcgccctggaccccaagaccggcgacaccgcctacagccagaagttcaagggcagggtgaccctgaccgccgacaagagcaccagcaccgcctacatggagctgagcagcctgaccagcgaggacaccgccgtgtactactgcaccaggttctacagctacacctactggggccagggcaccctggtgaccgtgagcagcagcagcggcggcagcagcaggagcagcagcagcggcggcggcggcagcggcggcggcggcgacgtggtgatgacccagagccccctgagcctgcccgtgacccccggcgagcccgccagcatcagctgcaggagcagccagagcctggtgcacagcaacggcaacacctacctgcactggtacctgcagaagcccggccagagcccccagctgctgatctacaaggtgagcaacaggttcagcggcgtgcccgacaggttcagcggcagcggcagcggcaccgacttcaccctgaagatcagcagggtggaggccgaggacgtgggcgtgtactactgcagccagaacacccacgtgccccccaccttcggccagggcaccaagctggagatcaagagcggcggcggcggcagcggcggcggcggcgagcagaagctgatcagcgaggaggacctgaagctgggcgacatcgagttcatcaaggtgaacaag

SEQ ID NO: 232 - protein, 279 aa, Artificial Sequence
  Synthetic Construct
QVQLVQSGAEVKKPGASVKVSCKASGYTFTDYEMHWVRQAPGQGLEWMGALDPKTGDTAYSQKFKGRVTLTADKSTSTAYMELSSLTSEDTAVYYCTRFYSYTYWGQGTLVTVSSSSGGSSRSSSSGGGGSGGGGDVVMTQSPLSLPVTPGEPASISCRSSQSLVHSNGNTYLHWYLQKPGQSPQLLIYKVSNRFSGVPDRFSGSGSGTDFTLKISRVEAEDVGVYYCSQNTHVPPTFGQGTKLEIKSGGGGSGGGGEQKLISEEDLKLGDIEFIKVNK

SEQ ID NO: 233 - DNA, 852 bp, Artificial Sequence
  GC33 + Isopeptide(3) tag
  CDS (1)..(852)
caggtgcagctggtgcagagcggcgccgaggtgaagaagcccggcgccagcgtgaaggtgagctgcaaggccagcggctacaccttcaccgactacgagatgcactgggtgaggcaggcccccggccagggcctggagtggatgggcgccctggaccccaagaccggcgacaccgcctacagccagaagttcaagggcagggtgaccctgaccgccgacaagagcaccagcaccgcctacatggagctgagcagcctgaccagcgaggacaccgccgtgtactactgcaccaggttctacagctacacctactggggccagggcaccctggtgaccgtgagcagcagcagcggcggcagcagcaggagcagcagcagcggcggcggcggcagcggcggcggcggcgacgtggtgatgacccagagccccctgagcctgcccgtgacccccggcgagcccgccagcatcagctgcaggagcagccagagcctggtgcacagcaacggcaacacctacctgcactggtacctgcagaagcccggccagagcccccagctgctgatctacaaggtgagcaacaggttcagcggcgtgcccgacaggttcagcggcagcggcagcggcaccgacttcaccctgaagatcagcagggtggaggccgaggacgtgggcgtgtactactgcagccagaacacccacgtgccccccaccttcggccagggcaccaagctggagatcaagagcggcggcggcggcagcggcggcggcggcggcaagcccatccccaaccccctgctgggcctggacagcaccgaccccatcgtgatgatcgacaacgacaagcccatcacc

SEQ ID NO: 234 - protein, 284 aa, Artificial Sequence
  Synthetic Construct
QVQLVQSGAEVKKPGASVKVSCKASGYTFTDYEMHWVRQAPGQGLEWMGALDPKTGDTAYSQKFKGRVTLTADKSTSTAYMELSSLTSEDTAVYYCTRFYSYTYWGQGTLVTVSSSSGGSSRSSSSGGGGSGGGGDVVMTQSPLSLPVTPGEPASISCRSSQSLVHSNGNTYLHWYLQKPGQSPQLLIYKVSNRFSGVPDRFSGSGSGTDFTLKISRVEAEDVGVYYCSQNTHVPPTFGQGTKLEIKSGGGGSGGGGGKPIPNPLLGLDSTDPIVMIDNDKPIT

SEQ ID NO: 235 - DNA, 150 bp, Artificial Sequence
  N-terminal PEPN + Isopeptide(1) tag
  CDS (1)..(150)
acccacgtgagccccaaccagggcggcctgcccagcagcggcggcggcggcagcggcggcggcggcaaggagaccgccgccgccaagttcgagagacagcacatggacagcgcccacatcgtgatggtggacgcctacaagcccaccaag

SEQ ID NO: 236 - protein, 50 aa, Artificial Sequence
  Synthetic Construct
THVSPNQGGLPSSGGGGSGGGGKETAAAKFERQHMDSAHIVMVDAYKPTK

SEQ ID NO: 237 - DNA, 150 bp, Artificial Sequence
  C-terminal PEPN + Isopeptide(1) tag
  CDS (1)..(150)
gcccacatcgtgatggtggacgcctacaagcccaccaagagcggcggcggcggcagcggcggcggcggcaaggagaccgccgccgccaagttcgagagacagcacatggacagcacccacgtgagccccaaccagggcggcctgcccagc

SEQ ID NO: 238 - protein, 50 aa, Artificial Sequence
  Synthetic Construct
AHIVMVDAYKPTKSGGGGSGGGGKETAAAKFERQHMDSTHVSPNQGGLPS

SEQ ID NO: 239 - DNA, 132 bp, Artificial Sequence
  N-terminal PEPN + Isopeptide(2) tag
  CDS (1)..(132)
acccacgtgagccccaaccagggcggcctgcccagcagcggcggcggcggcagcggcggcggcggcgagcagaagctgatcagcgaggaggacctgaagctgggcgacatcgagttcatcaaggtgaacaag

SEQ ID NO: 240 - protein, 44 aa, Artificial Sequence
  Synthetic Construct
THVSPNQGGLPSSGGGGSGGGGEQKLISEEDLKLGDIEFIKVNK

SEQ ID NO: 241 - DNA, 132 bp, Artificial Sequence
  C-terminal PEPN + Isopeptide(2) tag
  CDS (1)..(132)
aagctgggcgacatcgagttcatcaaggtgaacaagagcggcggcggcggcagcggcggcggcggcgagcagaagctgatcagcgaggaggacctgacccacgtgagccccaaccagggcggcctgcccagc

SEQ ID NO: 242 - protein, 44 aa, Artificial Sequence
  Synthetic Construct
KLGDIEFIKVNKSGGGGSGGGGEQKLISEEDLTHVSPNQGGLPS

SEQ ID NO: 243 - DNA, 147 bp, Artificial Sequence
  N-terminal PEPN + Isopeptide(3) tag
  CDS (1)..(147)
acccacgtgagccccaaccagggcggcctgcccagcagcggcggcggcggcagcggcggcggcggcggcaagcccatccccaaccccctgctgggcctggacagcaccgaccccatcgtgatgatcgacaacgacaagcccatcacc

SEQ ID NO: 244 - protein, 49 aa, Artificial Sequence
  Synthetic Construct
THVSPNQGGLPSSGGGGSGGGGGKPIPNPLLGLDSTDPIVMIDNDKPIT

SEQ ID NO: 245 - DNA, 147 bp, Artificial Sequence
  C-terminal PEPN + Isopeptide(3) tag
  CDS (1)..(147)
gaccccatcgtgatgatcgacaacgacaagcccatcaccagcggcggcggcggcagcggcggcggcggcggcaagcccatccccaaccccctgctgggcctggacagcaccacccacgtgagccccaaccagggcggcctgcccagc

SEQ ID NO: 246 - protein, 49 aa, Artificial Sequence
  Synthetic Construct
DPIVMIDNDKPITSGGGGSGGGGGKPIPNPLLGLDSTTHVSPNQGGLPS

SEQ ID NO: 247 - DNA, 1065 bp, Artificial Sequence
  GC33 + Isopeptide(1) domain
  CDS (1)..(1065)
caggtgcagctggtgcagagcggcgccgaggtgaagaagcccggcgccagcgtgaaggtgagctgcaaggccagcggctacaccttcaccgactacgagatgcactgggtgaggcaggcccccggccagggcctggagtggatgggcgccctggaccccaagaccggcgacaccgcctacagccagaagttcaagggcagggtgaccctgaccgccgacaagagcaccagcaccgcctacatggagctgagcagcctgaccagcgaggacaccgccgtgtactactgcaccaggttctacagctacacctactggggccagggcaccctggtgaccgtgagcagcagcagcggcggcagcagcaggagcagcagcagcggcggcggcggcagcggcggcggcggcgacgtggtgatgacccagagccccctgagcctgcccgtgacccccggcgagcccgccagcatcagctgcaggagcagccagagcctggtgcacagcaacggcaacacctacctgcactggtacctgcagaagcccggccagagcccccagctgctgatctacaaggtgagcaacaggttcagcggcgtgcccgacaggttcagcggcagcggcagcggcaccgacttcaccctgaagatcagcagggtggaggccgaggacgtgggcgtgtactactgcagccagaacacccacgtgccccccaccttcggccagggcaccaagctggagatcaagagcggcggcggcggcagcggcggcggcggcaaggagaccgccgccgccaagttcgagaggcagcacatggacagcgacagcgccacccacatcaagttcagcaagagggacgaggacggcaaggagctggccggcgccaccatggagctgagggacagcagcggcaagaccatcagcacctggatcagcgacggccaggtgaaggacttctacctgtaccccggcaagtacaccttcgtggagaccgccgcccccgacggctacgaggtggccaccgccatcaccttcaccgtgaacgagcagggccaggtgaccgtgaacggc

SEQ ID NO: 248 - protein, 355 aa, Artificial Sequence
  Synthetic Construct
QVQLVQSGAEVKKPGASVKVSCKASGYTFTDYEMHWVRQAPGQGLEWMGALDPKTGDTAYSQKFKGRVTLTADKSTSTAYMELSSLTSEDTAVYYCTRFYSYTYWGQGTLVTVSSSSGGSSRSSSSGGGGSGGGGDVVMTQSPLSLPVTPGEPASISCRSSQSLVHSNGNTYLHWYLQKPGQSPQLLIYKVSNRFSGVPDRFSGSGSGTDFTLKISRVEAEDVGVYYCSQNTHVPPTFGQGTKLEIKSGGGGSGGGGKETAAAKFERQHMDSDSATHIKFSKRDEDGKELAGATMELRDSSGKTISTWISDGQVKDFYLYPGKYTFVETAAPDGYEVATAITFTVNEQGQVTVNG

SEQ ID NO: 249 - DNA, 1149 bp, Artificial Sequence
  GC33 + Isopeptide(2) domain
  CDS (1)..(1149)
caggtgcagctggtgcagagcggcgccgaggtgaagaagcccggcgccagcgtgaaggtgagctgcaaggccagcggctacaccttcaccgactacgagatgcactgggtgaggcaggcccccggccagggcctggagtggatgggcgccctggaccccaagaccggcgacaccgcctacagccagaagttcaagggcagggtgaccctgaccgccgacaagagcaccagcaccgcctacatggagctgagcagcctgaccagcgaggacaccgccgtgtactactgcaccaggttctacagctacacctactggggccagggcaccctggtgaccgtgagcagcagcagcggcggcagcagcaggagcagcagcagcggcggcggcggcagcggcggcggcggcgacgtggtgatgacccagagccccctgagcctgcccgtgacccccggcgagcccgccagcatcagctgcaggagcagccagagcctggtgcacagcaacggcaacacctacctgcactggtacctgcagaagcccggccagagcccccagctgctgatctacaaggtgagcaacaggttcagcggcgtgcccgacaggttcagcggcagcggcagcggcaccgacttcaccctgaagatcagcagggtggaggccgaggacgtgggcgtgtactactgcagccagaacacccacgtgccccccaccttcggccagggcaccaagctggagatcaagagcggcggcggcggcagcggcggcggcggcgagcagaagctgatcagcgaggaggacctgggcagccacatgaagcccctgaggggcgccgtgttcagcctgcagaagcagcaccccgactaccccgacatctacggcgccatcgaccagaacggcacctaccagaacgtgaggaccggcgaggacggcaagctgaccttcaagaacctgagcgacggcaagtacaggctgttcgagaacagcgagcccgccggctacaagcccgtgcagaacaagcccatcgtggccttccagatcgtgaacggcgaggtgagggacgtgaccagcatcgtgccccaggacatccccgccacctacgagttcaccaacggcaagcactacatcaccaacgagcccatcccccccaag

SEQ ID NO: 250 - protein, 383 aa, Artificial Sequence
  Synthetic Construct
QVQLVQSGAEVKKPGASVKVSCKASGYTFTDYEMHWVRQAPGQGLEWMGALDPKTGDTAYSQKFKGRVTLTADKSTSTAYMELSSLTSEDTAVYYCTRFYSYTYWGQGTLVTVSSSSGGSSRSSSSGGGGSGGGGDVVMTQSPLSLPVTPGEPASISCRSSQSLVHSNGNTYLHWYLQKPGQSPQLLIYKVSNRFSGVPDRFSGSGSGTDFTLKISRVEAEDVGVYYCSQNTHVPPTFGQGTKLEIKSGGGGSGGGGEQKLISEEDLGSHMKPLRGAVFSLQKQHPDYPDIYGAIDQNGTYQNVRTGEDGKLTFKNLSDGKYRLFENSEPAGYKPVQNKPIVAFQIVNGEVRDVTSIVPQDIPATYEFTNGKHYITNEPIPPK

SEQ ID NO: 251 - DNA, 1185 bp, Artificial Sequence
  GC33 + Isopeptide(3) domain
  CDS (1)..(1185)
caggtgcagctggtgcagagcggcgccgaggtgaagaagcccggcgccagcgtgaaggtgagctgcaaggccagcggctacaccttcaccgactacgagatgcactgggtgaggcaggcccccggccagggcctggagtggatgggcgccctggaccccaagaccggcgacaccgcctacagccagaagttcaagggcagggtgaccctgaccgccgacaagagcaccagcaccgcctacatggagctgagcagcctgaccagcgaggacaccgccgtgtactactgcaccaggttctacagctacacctactggggccagggcaccctggtgaccgtgagcagcagcagcggcggcagcagcaggagcagcagcagcggcggcggcggcagcggcggcggcggcgacgtggtgatgacccagagccccctgagcctgcccgtgacccccggcgagcccgccagcatcagctgcaggagcagccagagcctggtgcacagcaacggcaacacctacctgcactggtacctgcagaagcccggccagagcccccagctgctgatctacaaggtgagcaacaggttcagcggcgtgcccgacaggttcagcggcagcggcagcggcaccgacttcaccctgaagatcagcagggtggaggccgaggacgtgggcgtgtactactgcagccagaacacccacgtgccccccaccttcggccagggcaccaagctggagatcaagagcggcggcggcggcagcggcggcggcggcggcaagcccatccccaaccccctgctgggcctggacagcaccagcagcggcctggtgcccaggggcagccacatggccagcatgaccggcggccagcagatgggcaggggcagcagcggcctgagcggcgagaccggccagagcggcaacaccaccatcgaggaggacagcaccacccacgtgaagttcagcaagagggacgccaacggcaaggagctggccggcgccatgatcgagctgaggaacctgagcggccagaccatccagagctggatcagcgacggcaccgtgaaggtgttctacctgatgcccggcacctaccagttcgtggagaccgccgcccccgagggctacgagctggccgcccccatcaccttcaccatcgacgagaagggccagatctgggtggacagc

SEQ ID NO: 252 - protein, 395 aa, Artificial Sequence
  Synthetic Construct
QVQLVQSGAEVKKPGASVKVSCKASGYTFTDYEMHWVRQAPGQGLEWMGALDPKTGDTAYSQKFKGRVTLTADKSTSTAYMELSSLTSEDTAVYYCTRFYSYTYWGQGTLVTVSSSSGGSSRSSSSGGGGSGGGGDVVMTQSPLSLPVTPGEPASISCRSSQSLVHSNGNTYLHWYLQKPGQSPQLLIYKVSNRFSGVPDRFSGSGSGTDFTLKISRVEAEDVGVYYCSQNTHVPPTFGQGTKLEIKSGGGGSGGGGGKPIPNPLLGLDSTSSGLVPRGSHMASMTGGQQMGRGSSGLSGETGQSGNTTIEEDSTTHVKFSKRDANGKELAGAMIELRNLSGQTIQSWISDGTVKVFYLMPGTYQFVETAAPEGYELAAPITFTIDEKGQIWVDS

SEQ ID NO: 253 - DNA, 360 bp, Artificial Sequence
  N-terminal PEPN + Isopeptide(1) domain
  CDS (1)..(360)
acccacgtgagccccaaccagggcggcctgcccagcagcggcggcggcggcagcggcggcggcggcaaggagaccgccgccgccaagttcgagaggcagcacatggacagcgacagcgccacccacatcaagttcagcaagagggacgaggacggcaaggagctggccggcgccaccatggagctgagggacagcagcggcaagaccatcagcacctggatcagcgacggccaggtgaaggacttctacctgtaccccggcaagtacaccttcgtggagaccgccgcccccgacggctacgaggtggccaccgccatcaccttcaccgtgaacgagcagggccaggtgaccgtgaacggc

SEQ ID NO: 254 - protein, 120 aa, Artificial Sequence
  Synthetic Construct
THVSPNQGGLPSSGGGGSGGGGKETAAAKFERQHMDSDSATHIKFSKRDEDGKELAGATMELRDSSGKTISTWISDGQVKDFYLYPGKYTFVETAAPDGYEVATAITFTVNEQGQVTVNG

SEQ ID NO: 255 - DNA, 360 bp, Artificial Sequence
  C-terminal PEPN + Isopeptide(1) domain
  CDS (1)..(360)
gacagcgccacccacatcaagttcagcaagagggacgaggacggcaaggagctggccggcgccaccatggagctgagggacagcagcggcaagaccatcagcacctggatcagcgacggccaggtgaaggacttctacctgtaccccggcaagtacaccttcgtggagaccgccgcccccgacggctacgaggtggccaccgccatcaccttcaccgtgaacgagcagggccaggtgaccgtgaacggcagcggcggcggcggcagcggcggcggcggcaaggagaccgccgccgccaagttcgagaggcagcacatggacagcacccacgtgagccccaaccagggcggcctgcccagc

SEQ ID NO: 256 - protein, 120 aa, Artificial Sequence
  Synthetic Construct
DSATHIKFSKRDEDGKELAGATMELRDSSGKTISTWISDGQVKDFYLYPGKYTFVETAAPDGYEVATAITFTVNEQGQVTVNGSGGGGSGGGGKETAAAKFERQHMDSTHVSPNQGGLPS

SEQ ID NO: 257 - DNA, 444 bp, Artificial Sequence
  N-terminal PEPN + Isopeptide(2) domain
  CDS (1)..(444)
acccacgtgagccccaaccagggcggcctgcccagcagcggcggcggcggcagcggcggcggcggcgagcagaagctgatcagcgaggaggacctgggcagccacatgaagcccctgaggggcgccgtgttcagcctgcagaagcagcaccccgactaccccgacatctacggcgccatcgaccagaacggcacctaccagaacgtgaggaccggcgaggacggcaagctgaccttcaagaacctgagcgacggcaagtacaggctgttcgagaacagcgagcccgccggctacaagcccgtgcagaacaagcccatcgtggccttccagatcgtgaacggcgaggtgagggacgtgaccagcatcgtgccccaggacatccccgccacctacgagttcaccaacggcaagcactacatcaccaacgagcccatcccccccaag

SEQ ID NO: 258 - protein, 148 aa, Artificial Sequence
  Synthetic Construct
THVSPNQGGLPSSGGGGSGGGGEQKLISEEDLGSHMKPLRGAVFSLQKQHPDYPDIYGAIDQNGTYQNVRTGEDGKLTFKNLSDGKYRLFENSEPAGYKPVQNKPIVAFQIVNGEVRDVTSIVPQDIPATYEFTNGKHYITNEPIPPK

SEQ ID NO: 259 - DNA, 444 bp, Artificial Sequence
  C-terminal PEPN + Isopeptide(2) domain
  CDS (1)..(444)
ggcagccacatgaagcccctgaggggcgccgtgttcagcctgcagaagcagcaccccgactaccccgacatctacggcgccatcgaccagaacggcacctaccagaacgtgaggaccggcgaggacggcaagctgaccttcaagaacctgagcgacggcaagtacaggctgttcgagaacagcgagcccgccggctacaagcccgtgcagaacaagcccatcgtggccttccagatcgtgaacggcgaggtgagggacgtgaccagcatcgtgccccaggacatccccgccacctacgagttcaccaacggcaagcactacatcaccaacgagcccatcccccccaagagcggcggcggcggcagcggcggcggcggcgagcagaagctgatcagcgaggaggacctgacccacgtgagccccaaccagggcggcctgcccagc

SEQ ID NO: 260 - protein, 148 aa, Artificial Sequence
  Synthetic Construct
GSHMKPLRGAVFSLQKQHPDYPDIYGAIDQNGTYQNVRTGEDGKLTFKNLSDGKYRLFENSEPAGYKPVQNKPIVAFQIVNGEVRDVTSIVPQDIPATYEFTNGKHYITNEPIPPKSGGGGSGGGGEQKLISEEDLTHVSPNQGGLPS

SEQ ID NO: 261 - DNA, 480 bp, Artificial Sequence
  N-terminal PEPN + Isopeptide(3) domain
  CDS (1)..(480)
acccacgtgagccccaaccagggcggcctgcccagcagcggcggcggcggcagcggcggcggcggcggcaagcccatccccaaccccctgctgggcctggacagcaccagcagcggcctggtgcccaggggcagccacatggccagcatgaccggcggccagcagatgggcaggggcagcagcggcctgagcggcgagaccggccagagcggcaacaccaccatcgaggaggacagcaccacccacgtgaagttcagcaagagggacgccaacggcaaggagctggccggcgccatgatcgagctgaggaacctgagcggccagaccatccagagctggatcagcgacggcaccgtgaaggtgttctacctgatgcccggcacctaccagttcgtggagaccgccgcccccgagggctacgagctggccgcccccatcaccttcaccatcgacgagaagggccagatctgggtggacagc

SEQ ID NO: 262 - protein, 160 aa, Artificial Sequence
  Synthetic Construct
THVSPNQGGLPSSGGGGSGGGGGKPIPNPLLGLDSTSSGLVPRGSHMASMTGGQQMGRGSSGLSGETGQSGNTTIEEDSTTHVKFSKRDANGKELAGAMIELRNLSGQTIQSWISDGTVKVFYLMPGTYQFVETAAPEGYELAAPITFTIDEKGQIWVDS

SEQ ID NO: 263 - DNA, 480 bp, Artificial Sequence
  C-terminal PEPN + Isopeptide(3) domain
  CDS (1)..(480)
agcagcggcctggtgcccaggggcagccacatggccagcatgaccggcggccagcagatgggcaggggcagcagcggcctgagcggcgagaccggccagagcggcaacaccaccatcgaggaggacagcaccacccacgtgaagttcagcaagagggacgccaacggcaaggagctggccggcgccatgatcgagctgaggaacctgagcggccagaccatccagagctggatcagcgacggcaccgtgaaggtgttctacctgatgcccggcacctaccagttcgtggagaccgccgcccccgagggctacgagctggccgcccccatcaccttcaccatcgacgagaagggccagatctgggtggacagcagcggcggcggcggcagcggcggcggcggcggcaagcccatccccaaccccctgctgggcctggacagcaccacccacgtgagccccaaccagggcggcctgcccagc

SEQ ID NO: 264 - protein, 160 aa, Artificial Sequence
  Synthetic Construct
SSGLVPRGSHMASMTGGQQMGRGSSGLSGETGQSGNTTIEEDSTTHVKFSKRDANGKELAGAMIELRNLSGQTIQSWISDGTVKVFYLMPGTYQFVETAAPEGYELAAPITFTIDEKGQIWVDSSGGGGSGGGGGKPIPNPLLGLDSTTHVSPNQGGLPS

SEQ ID NO: 265 - protein, 674 aa, Enterococcus durans
  MISC_FEATURE (1)..(674)
MTKSVKFLVLLLVMILPIAGALLIGPISFGAELSKSSIVDKVELDHTTLYQGEMTSIKVSFSDKENQKIKPGDTITLTLPNALVGMTENDGSPRKINLNGLGEVFIYKDHVVATFNEKVESLHNVNGHFSFGIKTLITNSSQPNVIETDFGTATATQRLTIEGVTNTETGQIERDYPFFYKVGDLAGESNQVRWFLNVNLNKSDVTEDISIADRQGSGQQLNKESFTFDIVNDKETKYISLAEFEQQGYGKIDFVTDNDFNLRFYRDKARFTSFIVRYTSTITEAGQHQATFENSYDINYQLNNQDATNEKNTSQVKNVFVEGEASGNQNVEMPTEESLDIPLETIDEWEPKTPTSEQATETSEKTGATETAESSQPEVHVSPTEEENPDESETLGTIEPIIPEKPSVTTKENGVTETAESSQPEVHVSPTEEENPDESETLGTIAPILPEKPSVTTEENGTTETAESSQPKVHVSPTEEENPDESETLGTIAPILPEKPSVTTEENGTTETAESSQPEVHVSSAEEENPDESETLGTIAPILPEKPSVTTEENGATETAESSQSEVHVSPTKEITITEKKQPSTETTVETNKNVTSKNQPQILNAPLNTVKNEGSPQLAPQLLSEPIQKLNEANGQRELPKTGTTKTPFMLIAGILASTFAVLGVSYLQIRKN

SEQ ID NO: 266 - protein, 553 aa, Bacillus cereus
  MISC_FEATURE (1)..(553)
MKKIFSVLLVLFLTFSTWSSVLVKADSPSKGTLTIHKYEQEKDGAQGLEGDGSANQEVPKDVKPLKGVTFEVKRVASFEKISNDGKIVKEDVKPVMGATPNQVVTDDNGQAVLKDLPLGRYEVKEVAGPPHVNLNPNTYTVDIPLTNKEGKVLNYDVHMYPKNEIKRGAVDLIKTGVNEKALAGAVFSLFKKDGTEVKKELATDANGHIRVQGLEYGEYYFQETKAPKGYVIDPTKREFFVKNSGTINEDGTITSGTVVKIEVKNNEEPTIDKKINGKLEALPINPLTNYNYDIKTLIPEDIKEYKKYVVTDTLDNRLVIQGKPIVKIDGAEVNANVVEVAIEGQKVTATVKDFTKLDGKKEFHLQIKSQVKEGVPSGSEILNTAKIHFTNKNDVIGEKESKPVVVIPTTGIIELTKIDSANKNKLKGAEFVLKDNNGKIVVVAGKEVTGVSDENGVIKWSNIPYGDYQIFETKAPTYTKEDGTKTSYQLLKDPIDVKISENNQTVKLTIENNKSGWILPVTGGIGTTLFTVIGLTLMLTAAFVFFRKKFARN

SEQ ID NO: 267 - protein, 1183 aa, Staphylococcus aureus
  MISC_FEATURE (1)..(1183)
MNKNVLKFMVFIMLLNIITPLFNKNEAFAARDISSTNVTDLTVSPSKIEDGGKTTVKMTFDDKNGKIQNGDMIKVAWPTSGTVKIEGYSKTVPLTVKGEQVGQAVITPDGATITFNDKVEKLSDVSGFAEFEVQGRNLTQTNTSDDKVATITSGNKSTNVTVHKSEAGTSSVFYYKTGDMLPEDTTHVRWFLNINNEKSYVSKDITIKDQIQGGQQLDLSTLNINVTGTHSNYYSGQSAITDFEKAFPGSKITVDNTKNTIDVTIPQGYGSYNSFSINYKTKITNEQQKEFVNNSQAWYQEHGKEEVNGKSFNHTVHNINANAGIEGTVKGELKVLKQDKDTKAPIANVKFKLSKKDGSVVKDNQKEIEIITDANGIANIKALPSGDYILKEIEAPRPYTFDKDKEYPFTMKDTDNQGYFTTIENAKAIEKTKDVSAQKVWEGTQKVKPTIYFKLYKQDDNQNTTPVDKAEIKKLEDGTTKVTWSNLPENDKNGKAIKYLVKEVNAQGEDTTPEGYTKKENGLVVTNTEKPIETTSISGEKVWDDKDNQDGKRPEKVSVNLLANGEKVKTLDVTSETNWKYEFKDLPKYDEGKKIEYTVTEDHVKDYTTDINGTTITNKYTPGETSATVTKNWDDNNNQDGKRPTEIKVELYQDGKATGKTAILNESNNWTHTWTGLDEKAKGQQVKYTVEELTKVKGYTTHVDNNDMGNLIVTNKYTPETTSISGEKVWDDKDNQDGKRPEKVSVNLLADGEKVKTLDVTSETNWKYEFKDLPKYDEGKKIEYTVTEDHVKDYTTDINGTTITNKYTPGETSATVTKNWDDNNNQDGKRPTEIKVELYQDGKATGKTAILNESNNWTHTWTGLDEKAKGQQVKYTVEELTKVKGYTTHVDNNDMGNLIVTNKYTPETTSISGEKVWDDKDNQDGKRPEKVSVNLLANGEKVKTLDVTSETNWKYEFKDLPKYDEGKKIEYTVTEDHVKDYTTDINGTTITNKYTPGETSATVTKNWDDNNNQDGKRPTEIKVELYQDGKATGKTAILNESNNWTHTWTGLDEKAKGQQVKYTVDELTKVNGYTTHVDNNDMGNLIVTNKYTPKKPNKPIYPEKPKDKTPPTKPDHSNKVKPTPPDKPSKVDKDDQPKDNKTKPENPLKELPKTGMKIITSWITWVFIGILGLYLILRKRFNS

SEQ ID NO: 268 - protein, 733 aa, Streptococcus pyogenes
  MISC_FEATURE (1)..(733)
MTQKNSYKLSFLLSLTGFILGLLLVFIGLSGVSVGHAETRNGANKQGAFEIKKNKSQEEYNYEVYDNRNILQDGEHKLEIKRVDGTGKTYQGFCFQLTKNFPTAQGVSKKLYKKLSSSDEETLKQYASKYTSNRRGDTSGNLKKQIAKVLTEGYPTNKSDWLNGLTENEKIEVTQDAIWYFTETTVPADRSYTNRNVNSQKMKEVYQKLIDTTDIDKYEDVQFDLFVPQDTNLQAVISVEPVIESLPWTSLKPIAQKDITAKKIWVDAPKEKPIIYFKLYRQLPGEKEVAVDDAELKQINSEGQQEISVTWTNQLVTDEKGMAYIYSVKEVDKNGELLEPKDYIKKEDGLTVTNTYVKPTSGHYDIEVTFGNGHIDITEDTTPDIVSGENQMKQIEGEDSKPIDEVTENNLIEFGKNTMPGEEDGTNSNKYEEVEDSRPVDTLSGLSSEQGQSGDMTIEEDSATHIKFSKRDIDGKELAGATMELRDSSGKTISTWISDGQVKDFYLMPGKYTFVETAAPDGYEIATAITFTVNEQGQVTVNGKATKGDAHIVMVDAYKPTKGSGQVIDIEEKLPDEQGHSGSTTEIEDSKSSDLIIGGQGEVVDTTEDTQSGMTGHSASTTEIEDSKSSDVIVGGQGQIVETTEDTQTGMHGDSGRKTEVEDTKLVQSFHFDNKESESNSEIPKKDKPKSNTSLPATGEKQHNKFFWMVTSCSLISSVFVISLKTKKCLSSC

SEQ ID NO: 269 - protein, 762 aa, Artificial Sequence
  FCT-2
  MISC_FEATURE (1)..(762)
MRGEKMKKTRFPNKLNTLNTQRVLSKNSKRFTVTLVGVFLMIFALVTSMVGAKTVFGLVESSTPNAINPDSSSEYRWYGYESYVRGHPYYKQFRVAHDLRVNLEGSRSYQVYCFNLKKAFPLGSDSSVKKWYKKHDGISTKFEDYAISPRITGDELNQKLRAVMYNGHPQNANGIMEGLEPLNAIRVTQEAVWYYSDNAPISNPDESFKRESESNLVSTSQLSLMRQALKQLIDPNLATKMPKQVPDDFQLSIFESEDKGDKYNKGYQNLLSGGLVPTKPPTPGDPPMPPNQPQTTSVLIRKYAIGDYSKLLEGATLQLTGDNVNSFQARVFSSNDIGERIELSDGTYTLTELNSPAGYSIAEPITFKVEAGKVYTIIDGKQIENPNKEIVEPYSVEAYNDFEEFSVLTTQNYAKFYYAKNKNGSSQVVYCFNADLKSPPDSEDGGKTMTPDFTTGEVKYTHIAGRDLFKYTVKPRDTDPDTFLKHIKKVIEKGYREKGQAIEYSGLTETQLRAATQLAIYYFTDSAELDKDKLKDYHGFGDMNDSTLAVAKILVEYAQDSNPPQLTDLDFFIPNNNKYQSLIGTQWHPEDLVDIIRMEDKKEVIPVTHNLTLRKTVTGLAGDRTKDFHFEIELKNNKQELLSQTVKTDKTNLEFKDGKATINLKHGESLTLQGLPEGYSYLVKETDSEGYKVKVNSQEVANATVSKTGITSDETLAFENNKEPVVPTGVDQKINGYLALIVIAGISLGIWGIHTIRIRKHD

SEQ ID NO: 270 - protein, 307 aa, Streptococcus agalactiae
  MISC_FEATURE (1)..(307)
MKQTLKLMFSFLLMLGTMFGISQTVLAQETHQLTIVHLEARDIDRPNPQLEIAPKEGTPIEGVLYQLYQLKSTEDGDLLAHWNSLTITELKKQAQQVFEATTNQQGKATFNQLPDGIYYGLAVKAGEKNRNVSAFLVDLSEDKVIYPKIIWSTGELDLLKVGVDGDTKKPLAGVVFELYEKNGRTPIRVKNGVHSQDIDAAKHLETDSSGHIRISGLIHGDYVLKEIETQSGYQIGQAETAVTIEKSKTVTVTIENKKVPTPKVPSRGGLIPKTGEQQAMALVIIGGILIALALRLLSKHRKHQNKD

SEQ ID NO: 271 - protein, 893 aa, Streptococcus pneumoniae
  MISC_FEATURE (1)..(893)
MLNRETHMKKVRKIFQKAVAGLCCISQLTAFSSIVALAETPETSPAIGKVVIKETGEGGALLGDAVFELKNNTDGTTVSQRTEAQTGEAIFSNIKPGTYTLTEAQPPVGYKPSTKQWTVEVEKNGRTTVQGEQVENREEALSDQYPQTGTYPDVQTPYQIIKVDGSEKNGQHKALNPNPYERVIPEGTLSKRIYQVNNLDDNQYGIELTVSGKTVYEQKDKSVPLDVVILLDNSNSMSNIRNKNARRAERAGEATRSLIDKITSDSENRVALVTYASTIFDGTEFTVEKGVADKNGKRLNDSLFWNYDQTSFTTNTKDYSYLKLTNDKNDIVELKNKVPTEAEDHDGNRLMYQFGATFTQKALMKADEILTQQARQNSQKVIFHITDGVPTMSYPINFNHATFAPSYQNQLNAFFSKSPNKDGILLSDFITQATSGEHTIVRGDGQSYQMFTDKTVYEKGAPAAFPVKPEKYSEMKAAGYAVIGDPINGGYIWLNWRESILAYPFNSNTAKITNHGDPTRWYYNGNIAPDGYDVFTVGIGINGDPGTDEATATSFMQSISSKPENYTNVTDTTKILEQLNRYFHTIVTEKKSIENGTITDPMGELIDLQLGTDGRFDPADYTLTANDGSRLENGQAVGGPQNDGGLLKNAKVLYDTTEKRIRVTGLYLGTDEKVTLTYNVRLNDEFVSNKFYDTNGRTTLHPKEVEQNTVRDFPIPKIRDVRKYPEITISKEKKLGDIEFIKVNKNDKKPLRGAVFSLQKQHPDYPDIYGAIDQNGTYQNVRTGEDGKLTFKNLSDGKYRLFENSEPAGYKPVQNKPIVAFQIVNGEVRDVTSIVPQDIPAGYEFTNDKHYITNEPIPPKREYPRTGGIGMLPFYLIGCMMMGGVLLYTRKHP

SEQ ID NO: 272 - protein, 665 aa, Streptococcus pneumoniae
  MISC_FEATURE (1)..(665)
MKSINKFLTMLAALLLTASSLFSAATVFAAGTTTTSVTVHKLLATDGDMDKIANELETGNYAGNKVGVLPANAKEIAGVMFVWTNTNNEIIDENGQTLGVNIDPQTFKLSGAMPATAMKKLTEAEGAKFNTANLPAAKYKIYEIHSLSTYVGEDGATLTGSKAVPIEIELPLNDVVDAHVYPKNTEAKPKIDKDFKGKANPDTPRVDKDTPVNHQVGDVVEYEIVTKIPALANYATANWSDRMTEGLAFNKGTVKVTVDDVALEAGDYALTEVATGFDLKLTDAGLAKVNDQNAEKTVKITYSATLNDKAIVEVPESNDVTFNYGNNPDHGNTPKPNKPNENGDLTLTKTWVDATGAPIPAGAEATFDLVNAQTGKVVQTVTLTTDKNTVTVNGLDKNTEYKFVERSIKGYSADYQEITTAGEIAVKNWKDENPKPLDPTEPKVVTYGKKFVKVNDKDNRLAGAEFVIANADNAGQYLARKADKVSQEEKQLVVTTKDALDRAVAAYNALTAQQQTQQEKEKVDKAQAAYNAAVIAANNAFEWVADKDNENVVKLVSDAQGRFEITGLLAGTYYLEETKQPAGYALLTSRQKFEVTATSYSATGQGIEYTAGSGKDDATKVVNKKITIPQTGGIGTIIFAVAGAAIMGIAVYAYVKNNKDEDQLA

SEQ ID NO: 273 - protein, 401 aa, Streptococcus pneumoniae
  MISC_FEATURE (1)..(401)
MTMQKMQKMISRIFFVMALCFSLVWGAHAVQAQEDHTLVLQLENYQEVVSQLPSRDGHRLQVWKLDDSYSYDDRVQIVRDLHSWDENKLSSFKKTSFEMTFLENQIEVSHIPNGLYYVRSIIQTDAVSYPAEFLFEMTDQTVEPLVIVAKKTDTMTTKVKLIKVDQDHNRLEGVGFKLVSVARDVSEKEVPLIGEYRYSSSGQVGRTLYTDKNGEIFVTNLPLGNYRFKEVEPLAGYAVTTLDTDVQLVDHQLVTITVVNQKLPRGNVDFMKVDGRTNTSLQGAMFKVMKEESGHYTPVLQNGKEVVVTSGKDGRFRVEGLEYGTYYLWELQAPTGYVQLTSPVSFTIGKDTRKELVTVVKNNKRPRIDVPDTGEETLYILMLVAILLFGSGYYLTKKPNN

SEQ ID NO: 274 - protein, 1080 aa, Corynebacterium diphtheriae
  MISC_FEATURE (1)..(1080)
MNFGFTRHRSQLSHAALPAVLFLAITSTAITTPVDATPITSTNIDTVVEDAAENPPLDQESAALPTEVTDDNLQHVKLIITNNMISAGFATIERKNGESEFYGHDQVLIDGTEVPDSSVYSAPATENQGDLITINFAGLSIQSGQTISFSYRSSATSQNDTWLPSEANAFKYLAAPAESAIANTDEREAQSFLQGNFELSMSVSPALVQVGQPVTYTYTFKNTSSRYRLFWSNYADGAKGVIEDRLNLNDDVKCKWDEGNGWLKSKTGQRYIDTNSEATFSCVRTFEHVGNYTNSVNIKEAKQRTGPLNGQIGLTLAPTTIDDALSVKVVNVVNSQTDPQWSLTISSSKFYVDPSGEDVTYTYTVTNLSNDKIYYEALKHDVCSPIKIENSLQFDPENRKYYIPQNGTATWECATRINHETTGLVSGTFSDNKGNRSTVKASTQTKVKTPTLSNGTSYGIPRCDVIDFTTVNKSTGIGTLGSIEQQNGQFKKIEQSNIFPEKGSPAHHDRRIKKKGRMTTASATSAQHPEYVYYAALALGDSISISSDANMGIYRIHKISGTVEKITAPHFSQSALQNNQRFGATLTNRLAFDATGKLWSFAQDGHLYSLPMDGDGKAAGEWFDHGAVAGEAINGEGNAVGFESLVFGDIAFDGNGAMWILGSIRGLTKEDTNGRVIKDEVDPTTYLFTLKPPRDNTPITEKVQIVQKITGVGTSIDQKGFFGLAFGVDGTLYGSYDTSGDGISDSPGELYSFNLRDGKVTKVFSSPLMARVQDLSSCAFPAPRISAEKTAAHEVDKDTITYTITVRNSGNLEATGTKFTDNLPGSYVPNSAKLNGKPIPDLPVNSTNPTGNPFHDGLYIKSPDAAPGTIDPQSEAVIEMTINKLNSTNDGRVCNQAEINAVGQQVKTDDPTLPGHEDPTCVSVPISLKMSLKKAIYDPSAQSPKILDNLGGAKFAIYARTDTGDLGELRKEVSDEEPFEISPGTYLLVETQSPAGLSLLPKPVEFTITKSSSGFDVKSNSPLTVSFTKTDGIIVATVSDVKNGTLPKTGSTGFLPFVFVGLSIIVLTALWVQRRSQYKL

SEQ ID NO: 275 - protein, 1566 aa, Streptococcus mutans
  MISC_FEATURE (1)..(1566)
MKVKKTYGFRKSKISKTLCGAVLGTVAAVSVAGQKVFADETTTTSDVDTKVVGTQTGNPATNLPEAQGSASKEAEQSQNQAGETNGSIPVEVPKTDLDQAAKDAKSAGVNVVQDADVNKGTVKTAEEAVQKETEIKEDYTKQAEDIKKTTDQYKSDVAAHEAEVAKIKAKNQATKEQYEKDMAAHKAEVERINAANAASKTAYEAKLAQYQADLAAVQKTNAANQAAYQKALAAYQAELKRVQEANAAAKAAYDTAVAANNAKNTEIAAANEEIRKRNATAKAEYETKLAQYQAELKRVQEANVANEADYQAKLTAYQTELARVQKANADAKAAYEAAVAANNAKNAALTAENTAIKQRNENAKATYEAALKQYEADLAAAKKANAANEADYQAKLTAYQTELARVQKANADAKAAYEAAVAANNAANAALTAENTAIKKRNADAKADYEAKLAKYQADLAKYQKDLADYPVKLKAYEDEQASIKAALAELEKHKNEDGNLTEPSAQNLVYDLEPNANLSLTTDGKFLKASAVDDAFSKSTSKAKYDQKILQLDDLDITNLEQSNDVASSMELYGNFGDKAGWSTTVSNNSQVKWGSVLLERGQSATATYTNLQNSYYNGKKISKIVYKYTVDPKSKFQGQKVWLGIFTDPTLGVFASAYTGQVEKNTSIFIKNEFTFYDEDGKPINFDNALLSVASLNREHNSIEMAKDYSGKFVKISGSSIGEKNGMIYATDTLNFKQGEGGSRWTMYKNSQAGSGWDSSDAPNSWYGAGAIKMSGPNNHVTVGATSATNVMPVSDMPVVPGKDNTDGKKPNIWYSLNGKIRAVNVPKVTKEKPTPPVKPTAPTKPTYETEKPLKPAPVAPNYEKEPTPPTRTPDQAEPNKPTPPTYETEKPLEPAPVEPSYEAEPTPPTRTPDQAEPNKPTPPTYETEKPLEPAPVEPSYEAEPTPPTPTPDQPEPNKPVEPTYEVIPTPPTDPVYQDLPTPPSVPTVHFHYFKLAVQPQVNKEIRNNNDVNIDRTLVAKQSVVKFQLKTADLPAGRDETTSFVLVDPLPSGYQFNPEATKAASPGFDVAYDNATNTVTFKATAATLATFNADLTKSVATIYPTVVGQVLNDGATYKNNFTLTVNDAYGIKSNVVRVTTPGKPNDPDNPNNNYIKPTKVNKNENGVVIDGKTVLAGSTNYYELTWDLDQYKNDRSSADTIQKGFYYVDDYPEEALELRQDLVKITDANGNEVTGVSVDNYTSLEAAPQEIRDVLSKAGIRPKGAFQIFRADNPREFYDTYVKTGIDLKIVSPMVVKKQMGQTGGSYENQAYQIDFGNGYASNIVINNVPKINPKKDVTLTLDPADTNNVDGQTIPLNTVFNYRLIGGIIPANHSEELFEYNFYDDYDQTGDHYTGQYKVFAKVDITLKNGVIIKSGTELTQYTTAEVDTTKGAITIKFKEAFLRSVSIDSAFQAESYIQMKRIAVGTFENTYINTVNGVTYSSNTVKTTTPEDPTDPTDPQDPSSPRTSTVINYKPQSTAYQPSSVQETLLNTGVTNNAYMPLLGIIGLVTSFSLLGLKAKKD

SEQ ID NO: 276 - protein, 340 aa, Artificial Sequence
  Spy0128
  MISC_FEATURE (1)..(340)
MKLRHLLLTGAALTSFAATTVHGETVVNGAKLTVTKNLDLVNSNALIPNTDFTFKIEPDTTVNEDGNKFKGVALNTPMTKVTYTNSDKGGSNTKTAEFDFSEVTFEKPGVYYYKVTEEKIDKVPGVSYDTTSYTVQVHVLWNEEQQKPVATYIVGYKEGSKVPIQFKNSLDSTTLTVKKKVSGTGGDRSKDFNFGLTLKANQYYKASEKVMIEKTTKGGQAPVQTEASIDQLYHFTLKDGESIKVTNLPVGVDYVVTEDDYKSEKYTTNVEVSPQDGAVKNIAGNSTEQETSTDKDMTITFTNKKDFEVPTGVAMTVAPYIALGIVAVGGALYFVKKKNA

SEQ ID NO: 277 - protein, 834 aa, Streptococcus sp. SR1
  MISC_FEATURE (1)..(834)
MKNKKEVYGFRKSKVAKTLCGAVLGTALIAFADKAVFADEVTETTSTSTVEVATTGNPATNLAEAQGDMSQAAKESQAKAGSKDSALPVEVSSADLDKAVADAKTAGVKVVQDETKDKGTATTATENAQKQDEIKSDYAKQAEEIKTSTEAYKKAAATHQAETDKINAENKAADDKYQKDLKSHQEEVEKINTANATAKAEYEAKLAQYQKDLATVKKANEDSQQDYQNKLSAYQTELARVQKANAEAKEAYEKAVKENTEKNEALQAENEAIKQRNETAKANYDAAMKQYEADLAAIKKAKEDNDADYQAKLAAYQTELARVQKANADAKAAYEKAVEENTAKNNAIQAENEAIKQRNATAKSTYDAAMKKYEADLVAVKQANATNETDYQTKLAAYQTELARVQKANADAKAAYEKAVEDNKAKNAALKAENEEIKQRNAVAKTDYEAKLAKYEADLAKYKKEFAAYTAALAEAESKKKQDGYLSEPRSQSLNFKSEPNAIRTIDPSVHQYGQQELDALVKSWGISPTNPDRTKSTAYSYFNAINSNNTYAKLVLEKDKPVDVTYTGLKNSSFNGKKISKVVYTYTLKETGFNDGTKMTMFASSDPTVTAWYNDYFTSTNINVKVKFYDEEGQLMNLTGGLVNFSSLNRGNGSGAIDKDAIESVRNFNGRYIPISGSSIKIHENNSAYADSSNAEKSLGARWNTSEWDTTSSPNNWYGAIVGEITQSEISFNMASSKSGNIWFAFNSNINAIGVPTKPVAPTAPTQPMYETEKPLEPAPVAPTYENEPTPPVKTPDQPEPSKPEEPKYETEKPLEPAPVAPSYENEPTPPEL

SEQ ID NO: 278 - DNA, 63 bp, Artificial Sequence
  Signal sequence from secreted alkaline phosphatase [synthetic construct]
  CDS (1)..(63)
atgtggtggcgactctggtggctccttcttctgctccttctcctttggccaatggtgtgggcc

SEQ ID NO: 279 - protein, 21 aa, Artificial Sequence
  Synthetic Construct
MWWRLWWLLLLLLLLWPMVWA

SEQ ID NO: 280 - DNA, 63 bp, Mus musculus
  CDS (1)..(63)
atggaaacggatacgttgctgctctgggtcctgcttctttgggttcccgggtcaactggtgat

SEQ ID NO: 281 - protein, 21 aa, Mus musculus
METDTLLLWVLLLWVPGSTGD

SEQ ID NO: 282 - DNA, 99 bp, Homo sapiens
  CDS (1)..(99)
atggcagtgggggccagtggtctagaaggagataagatggctggtgccatgcctctgcaactcctcctgttgctgatcctactgggccctggcaacagc

SEQ ID NO: 283 - protein, 33 aa, Homo sapiens
MAVGASGLEGDKMAGAMPLQLLLLLILLGPGNS

SEQ ID NO: 284 - DNA, 81 bp, Homo sapiens
  CDS (1)..(81)
atggaatccaagggggccagttcctgccgtctgctcttctgcctcttgatctccgccaccgtcttcaggccaggccttgga

SEQ ID NO: 285 - protein, 27 aa, Homo sapiens
MESKGASSCRLLFCLLISATVFRPGLG

SEQ ID NO: 286 - DNA, 57 bp, Homo sapiens
  CDS (1)..(57)
atggtcctcctttggctcacgctgctcctgatcgccctgccctgtctcctgcaaacg

SEQ ID NO: 287 - protein, 19 aa, Homo sapiens
MVLLWLTLLLIALPCLLQT

1. An extracellular vesicle comprising: a vesicle localization moiety and one or more isopeptide domain(s), wherein the isopeptide domain is fused to the vesicle localization moiety so that the isopeptide domain is displayed by the vesicle localization moiety on the outside of the extracellular vesicle, whereby the isopeptide domain can form a covalent bond with an isopeptide tag.

2. The extracellular vesicle of claim 1, wherein the vesicle localization moiety is CLSTN1, IL3RA, ITGB1, SELPLG, LAMP2B or PTGFRN, or a variant thereof and/or a fragment thereof.

3. The extracellular vesicle of claim 1, wherein the vesicle localization moiety is a chimeric vesicle localization moiety comprising a surface-and-transmembrane domain of a first vesicle localization moiety and a cytosolic domain of a second vesicle localization moiety.

4. The extracellular vesicle of claim 1, wherein the isopeptide domain is selected from the group consisting of SEQ ID NO: 2, 4, 6, 8, 10, 12, 14, 16, 18, 20, 22, 24, 26, 28, 30, 32, 34, 36, 38, 40, 42, 44, 46, 48, 50, 52, 54, 56, 58, and 60.

5. The extracellular vesicle of claim 3, wherein the first and second vesicle localization moieties are from different or unrelated proteins and wherein the first or second vesicle localization moiety is selected from the group consisting of CLSTN1, IL3RA, ITGB1, LAMP2B, PTGFRN, and SELPLG, or a variant thereof and/or a fragment thereof.

6. The extracellular vesicle of claim 1, further comprising a spacer polypeptide wherein the spacer polypeptide is located between the isopeptide domain and the vesicle localization moiety.

7. The extracellular vesicle of claim 1, wherein the vesicle localization moiety comprises two isopeptide domains.

8. The extracellular vesicle of claim 7, further comprising a spacer polypeptide located between the two isopeptide domains.

9. The extracellular vesicle of claim 1, wherein the isopeptide domain is located at a N-terminus of the vesicle localization moiety.

10. The extracellular vesicle of claim 1, wherein isopeptide domain is located at N-terminal to a transmembrane domain of the vesicle localization moiety.

11. The extracellular vesicle of claim 1, further comprising a second isopeptide domain.

12. The extracellular vesicle of claim 11, wherein the first isopeptide domain is a SEQ ID NO: 32, and the second isopeptide domain is a SEQ ID NO: 58.

13. The extracellular vesicle of claim 1, further comprising a second and third isopeptide domains.

14. The extracellular vesicle of claim 13, wherein the first isopeptide domain is a SEQ ID NO: 32, the second domain is a SEQ ID NO: 58, and the third domain is a SEQ ID NO: 60.

15.-33. (canceled)

34. A nucleic acid encoding a vesicle localization moiety and an isopeptide domain, wherein the isopeptide domain is fused to the vesicle localization moiety so that the isopeptide domain is displayed by the vesicle localization moiety on the outside of an extracellular vesicle.

35.-42. (canceled)

43. A cell comprising the nucleic acid of claim 34.

44.-52. (canceled)

53. A method for making the vesicle of claim 1 comprising: expressing a nucleic acid encoding a vesicle localization moiety and an isopeptide domain, wherein the isopeptide domain is fused to the vesicle localization moiety so that the isopeptide domain is displayed by the vesicle localization moiety on the outside of an extracellular vesicle in a producer cell; and isolating a vesicle secreted into a culture medium by the producer cell.

54. A pharmaceutical composition comprising the vesicle of claim 1, and one or more pharmaceutically acceptable excipients.

55.-57. (canceled)

58. An extracellular vesicle comprising: a vesicle localization moiety and one or more isopeptide tag, wherein the isopeptide tag is fused to the vesicle localization moiety so that the isopeptide tag is displayed by the vesicle localization moiety on the outside of the extracellular vesicle, whereby the isopeptide tag can form a covalent bond with an isopeptide domain.

59.-122. (canceled)

123. The extracellular vesicle of claim 5, wherein the surface-and-transmembrane domain of a first vesicle localization moiety is the surface-and-transmembrane domain selected from the group consisting of LAM P2 and CLSTN1, or a homologue thereof.

124. The extracellular vesicle of claim 5, wherein the cytosolic domain of the second vesicle localization moiety is the cytosolic domain selected from the group consisting of PTGFRN, ITGA3, IL3RA, SELPLG, ITGB1 and CLSTN1, or a homologue thereof.
